(19) United States
(12) Patent Application Publication
(10) Pub. No.: US 2021/0115428 A1
(43) Pub. Date: Apr. 22, 2021

(54) SUPPRESSION OF PAIN BY GENE EDITING

(71) Applicant: President and Fellows of Harvard College, Cambridge, MA (US)

(72) Inventors: Juan Pablo Maianti, Revere, MA (US); David R. Liu, Lexington, MA (US)

(73) Assignee: President and Fellows of Harvard College, Cambridge, MA (US)

(21) Appl. No.: 16/492,548

(22) PCT Filed: Mar. 9, 2018
(86) PCT No.: PCT/US2018/021664

§ 371 Date: Sep. 9, 2019

Related U.S. Application Data
(60) Provisional application No. 62/469,408, filed on Mar. 9, 2017.

(51) Int. Cl. C12N 9/78; C12N 9/22; C12N 15/11; A61K 31/7088; A61K 38/46; A61K 38/50; C12N 9/96; A61K 9/00

(52) U.S. Cl. CPC C12N 9/78; A61K 48/00; C12N 15/11; A61K 31/7088; A61K 38/465; A61K 38/50; C12N 9/96; C12Y 305/04; A61K 9/0053; A61K 9/0029; C12N 2800/80; C12N 2310/20; C12N 2320/31; C07K 2319/00; C12N 9/22

(57) ABSTRACT

Provided herein are systems, compositions, kits, and methods for the suppression of pain (e.g., chronic pain). Genes encoding ion channels (e.g., SCN9A) responsible for the propagation pain signals in neurons (e.g., DRG neurons) may be edited using a genome editing agent (e.g., a nucleobase editor). In some embodiments, loss-of-function ion channel mutants are generated, leading to pain suppression. In some embodiments, the genome editing agent is administered locally to the site of pain or to the nerves responsible for propagation of the pain signal.

### RELATED APPLICATIONS

[0001] The present application claims priority under 35 U.S.C. § 119(e) to U.S. provisional application, U.S. Ser. No. 62/469,408, filed Mar. 9, 2017, which is incorporated herein by reference.

### BACKGROUND OF THE INVENTION

[0002] Long-term chronic pain due to trauma and associated with advanced cancer as well as other causes remains an unmet medical need. Management of pain using painkillers is inherently limited by the development of tolerance, physiological dependence, progressive addiction, and potential for overdose. Current health care policies in response to the massive demand for painkillers have led to extensive prescription of opioids, inadvertently contributing to broader public challenges associated with substance abuse and drug-related crime. Fundamentally, there is a pressing need for an innovative solution to address chronic pain that is non-addictive, generalizable, and/or permanent.

### SUMMARY OF THE INVENTION

[0003] Described herein are systems, compositions, kits, and methods for the suppression of pain (e.g., chronic pain). The strategies rely, at least in part, on the targeted editing of genes encoding proteins (e.g., ion channels such as Nav1.7 encoded by the SCN9A gene) responsible for the propagation of pain signals in sensory neurons that display dysregulated excitability, e.g., in dorsal root ganglia (DRG) neurons. The targeted genome editing may be achieved, in some embodiments, using a genome editing agent, e.g., a nucleobase editor comprising a catalytically inactive Cas9 or a Cas9 nickase and a cytosine deaminase. The nucleobase editor introduces cytosine (C) to thymine (T) mutations in the targeted gene. In some embodiments, loss-of-function ion channel mutants are generated, leading to pain suppression. In some embodiments, the genome editing agent is administered locally to the site of pain. The pain suppression strategies provided herein are effective in long-term pain suppression and have high safety profiles. In some embodiments, neurotropic viral delivery vectors are used to specifically deliver the genome editing agent to neurons. In some embodiments, neuron-specific promoters are used to drive the expression of the genome editing agents specifically in neurons.

[0004] Some aspects of the present disclosure provide methods of editing a polynucleotide encoding an ion channel in a dorsal root ganglia (DRG) neuron, the method comprising contacting the ion channel-encoding polynucleotide with: (i) a fusion protein comprising: (a) a guide nucleotide sequence-programmable DNA binding protein domain; and (b) a cytosine deaminase domain; and (ii) a guide nucleotide sequence targeting the fusion protein of (i) to a target cytosine (C) base in the ion channel-encoding polynucleotide, whereby the contacting results in deamination of the target C base by the fusion protein, resulting in a cytosine (C) to thymine (T) change in the ion channel-encoding polynucleotide. In some embodiments, the guide nucleotide sequence-programmable DNA binding protein domain is selected from the group consisting of: nuclease inactive Cas9 (dCas9) domains, nuclease inactive Cpf1 domains, nuclease inactive Argonaute domains, and variants thereof.

[0005] In some embodiments, the guide nucleotide sequence-programmable DNA-binding protein domain is a nuclease inactive Cas9 (dCas9) domain. In some embodiments, the dCas9 domain is from Streptococcus pyogenes. In some embodiments, the amino acid sequence of the dCas9 domain includes mutations corresponding to a D10A and/or H840A mutation in SEQ ID NO: 1. In some embodiments, the amino acid sequence of the dCas9 domain includes a mutation corresponding to a D10A mutation in SEQ ID NO: 1, and wherein the dCas9 domain includes a histidine at the position corresponding to amino acid 840 of SEQ ID NO: 1. In some embodiments, the guide nucleotide sequence-programmable DNA-binding protein domain comprises a nuclease inactive Cpf1 (dCpf1) domain. In some embodiments, the dCpf1domain is from a species of Acidaminococcus or Lachnospiraceae. In some embodiments, the guide nucleotide sequence-programmable DNA-binding protein domain comprises a nuclease inactive Argonaute (dAgo) domain. In some embodiments, the dAgo domain is from Natronobacterium gregoryi (dNgAgo).

[0006] In some embodiments, the cytosine deaminase domain comprises an apolipoprotein B mRNA-editing complex (APOBEC) family deaminase. In some embodiments, the cytosine deaminase is selected from the group consisting of APOBEC1, APOBEC2, APOBEC3A, APOBEC3B, APOBEC3C, APOBEC3D, APOBEC3F, APOBEC3G deaminase, APOBEC3H deaminase, APOBEC4 deaminase, activation-induced deaminase (AID), and pmCDA1. In some embodiments, the cytosine deaminase comprises the amino acid sequence of any one of SEQ ID NOs: 271-292 and 303.

[0007] In some embodiments, the fusion protein further comprises a uracil glycosylase inhibitor (UGI) domain. In some embodiments, the UGI domain comprises the amino acid sequence of SEQ ID NO: 304.

[0008] In some embodiments, the cytosine deaminase domain is fused to the N-terminus of the guide nucleotide sequence-programmable DNA-binding protein domain. In some embodiments, the UGI domain is fused to the C-terminus of the guide nucleotide sequence-programmable DNA-binding protein domain.

[0009] In some embodiments, the cytosine deaminase and the guide nucleotide sequence-programmable DNA-binding protein domain are fused via an optional linker. In some embodiments, the UGI domain is fused to the dCas9 domain via an optional linker.

[0010] In some embodiments, the fusion protein has the structure NH₂-[cytosine deaminase domain]-[optional linker sequence]-[guide nucleotide sequence-programmable DNA-binding protein domain]-[optional linker sequence]-[UGI domain]-COOH. In some embodiments, the fusion protein has the structure NH₂-[UGI domain]-[optional linker sequence]-[cytosine deaminase domain]-[optional linker sequence]-[guide nucleotide sequence-programmable DNA-binding protein domain]-COOH. In some embodiments, the fusion protein has the structure NH₂-[cytosine deaminase domain]-[optional linker sequence]-[guide nucleotide sequence-programmable DNA-binding protein domain]-COOH.

[0011] In some embodiments, the linker comprises (GGGS)ₙ (SEQ ID NO: 2430), (GGGGS)ₙ (SEQ ID NO: 308), (G)ₙ, (EAAAK)ₙ (SEQ ID NO: 309), (GGS)ₙ (SEQ ID NO: 2467), SGSETPGTSESATPES (SEQ ID NO: 310), or (XP)ₙ motif, or a combination of any of these, wherein n is independently an integer between 1 and 30, and wherein X is any amino acid. In some embodiments, the linker comprises the amino acid sequence SGSETPGTSESATPES (SEQ ID NO: 310). In some embodiments, the linker is (GGS)ₙ, and wherein n is 1, 3, or 7.

[0012] In some embodiments, the fusion protein comprises the amino acid sequence of any one of SEQ ID NO: 10, 293-302, and 2495.

[0013] In some embodiments, the polynucleotide encoding the ion channel comprises a coding strand and a complementary strand. In some embodiments, the polynucleotide encoding the ion channel comprises a coding region and a non-coding region. In some embodiments, the C to T change occurs in the coding region of the ion channel-encoding polynucleotide. In some embodiments, the C to T change leads to a mutation in the ion channel.

[0014] In some embodiments, the mutation introduces a premature stop codon in the ion channel-coding sequence that leads to a truncated or non-functional ion channel. In some embodiments, the premature stop codon is TAG (Amber), TGA (Opal), or TAA (Ochre). In some embodiments, the mutation destabilizes ion-channel protein folding. In some embodiments, the C to T change occurs at a C base-paired with the G base in a start codon (AUG).

[0015] In some embodiments, the C to T change occurs at the non-coding region of the ion channel-encoding polynucleotide. In some embodiments, the C to T change occurs at a splicing site in the non-coding region of the ion channel-encoding polynucleotide. In some embodiments, the C to T change occurs at an intron-exon junction. In some embodiments, the C to T change occurs at a splicing donor site. In some embodiments, the C to T change occurs at a splicing acceptor site.

[0016] In some embodiments, the ion channel is selected from the group consisting of: NaV1.7, NaV1.8, NaV1.9, NaV1.3, CaV3.2, HCN1, HCN2, and Ano1. In some embodiments, the ion channel is NaV1.7 encoded by the SCN9A gene.

[0017] In some embodiments, the mutation is a loss-of-function mutation. In some embodiments, the C to T change occurs in a target codon selected from Tables 2, 4, and 6. In some embodiments, the guide nucleotide sequence is selected from SEQ ID NOs: 339-1456.

[0018] In some embodiments, a PAM sequence is located 3′ of the C being changed. In some embodiments, a PAM sequence is located 5′ of the C being changed. In some embodiments, the PAM sequence is selected from the group consisting of: NGG, NGAN, NGNG, NGAG, NGCG, NNGRRT, NGGNG, NGRRN, NNNRRT, NNNGATT, NNAGAA, and NAAAC, wherein Y is pyrimidine, R is purine, and N is any nucleobase. In some embodiments, the PAM sequence is selected from the group consisting of: NNT, NNNT, and YNT, wherein Y is pyrimidine, and N is any nucleobase. In some embodiments, no PAM sequence is located 3′ of the target C base. In some embodiments, no PAM sequence is located 5′ of the target C base.

[0019] In some embodiments, at least 1, 2, 3, 4, 5, 6, 7, 8, 9, or 10 mutations are introduced into the ion channel-encoding polynucleotide. In some embodiments, the guide nucleotide sequence is RNA (gRNA). In some embodiments, the guide nucleotide sequence is ssDNA (gDNA).

[0020] In some embodiments, the DRG neuron is in a mammal. In some embodiments, the mammal is a rodent. In some embodiments, the rodent is a mouse. In some embodiments, the rodent is a rat. In some embodiments, the mammal is a human.

[0021] In some embodiments, a nucleic acid construct encoding the fusion protein is delivered to the DRG neuron via a neurotropic viral delivery vector. In some embodiments, the neurotropic viral delivery vector is derived from Herpesviridae, varicella zoster virus, pseudorabies virus, cyromegalovirus, Epstein-barr virus, encephalitis virus, polio virus, coxsackie virus, echo virus, mumps virus, measles virus, and rabies virus. In some embodiments, the neurotropic viral delivery vector is derived from Herpes Simplex Virus 1 (HSV-1). In some embodiments, the neurotropic viral delivery vector is derived from a recombinant adeno-associated virus (AAV).

[0022] Other aspects of the present disclosure provide compositions comprising: (i) a fusion protein comprising: (a) a guide nucleotide sequence-programmable DNA binding protein domain; and (b) a cytosine deaminase domain; and (ii) a guide nucleotide sequence targeting the fusion protein of (i) to a target cytosine (C) base in an ion channel-encoding polynucleotide.

[0023] Further provided herein are compositions comprising a neurotropic viral delivery vector comprising a nucleic acid encoding: (i) a fusion protein comprising: (a) a guide nucleotide sequence-programmable DNA binding protein domain; and (b) a cytosine deaminase domain; and (ii) a guide nucleotide sequence targeting the fusion protein of (i) to a target cytosine (C) base in an ion channel-encoding polynucleotide.

[0024] In some embodiments, the guide nucleotide sequence comprises the nucleotide sequence of any one of SEQ ID NOs: 339-1456, 1504-2425, and 2443-2445. In some embodiments, the composition further comprises a pharmaceutically acceptable carrier. Kits comprising the compositions described herein are also provided.

[0025] Other aspects of the present disclosure provide methods of suppressing pain, the method comprising administering to a subject in need thereof a therapeutically effective amount of the composition described herein.

[0026] In some embodiments, the pain is chronic pain. In some embodiments, the pain is selected from the group consisting of: neuropathic pain, allodynia, hyperalgesia, dysesthesia, causalgia, neuralgia, and arthralgia. In some embodiments, the pain is associated with cancer, tumor pressure, bone metastasis, chemotherapy peripheral neuropathy, radiculopathy (sciatica, lumbar, cervical, failed back surgery syndrome), piriformis syndrome, phantom pain, arachnoiditis, fibromyalgia, facet joint mediated pain, sympathetically-mediated pain syndrome such as complex regional pain syndromes (crps), sacroiliac (si) joint mediated pain, meralgia paresthetica, localized myofacial pain syndromes—myofacial trigger points, diffuse myofacial pain syndrome, post-herpetic neuralgia, trigeminal neuralgia, glossopharyngeal neuralgia, scar pain (post-epesiotomy, post-hernia repair, post-surgery, post-radiotherapy), vulvodynia, vaginismus, levator ani syndrome, chronic prostatitis, interstitial cystitis, first bite syndrome, rheumatoid arthritis pain, osteoarthritis pain, atypical odontalgia, phantom tooth pain, neuropathic orofacial pain, primary erythermalgia and atypical facial pain.

[0027] In some embodiments, the subject is a mammal. In some embodiments, the mammal is a rodent. In some embodiments, the rodent is a mouse. In some embodiments, the rodent is a rat. In some embodiments, the mammal is a human. In some embodiments, the mammal is a companion animal. In some embodiments, the companion animal is a dog, a cat, a horses, a cattle, a pig, a sheep, a goat, a chicken, a mouse, a rat, a guinea pig, or a hamster. In some embodiments, the composition is administered orally or parenterally.

[0028] The details of certain embodiments of the invention are set forth in the Detailed Description of Certain Embodiments, as described below. Other features, objects, and advantages of the invention will be apparent from the Definitions, Examples, Figures, and Claims.

### BRIEF DESCRIPTION OF THE DRAWINGS

[0029] The accompanying drawings, which constitute a part of this specification, illustrate several embodiments of the invention and together with the description, serve to explain the principles of the invention.

[0030] FIGS. 1A-1C show schematic representations of exemplary ion channels and signal transmission in doral root ganglion (DRG) neurons. FIG. 1A is a schematic representing a DRG neuron extending an axonal projection that expresses specialized ion channels for triggering and propagating action potentials (AP) in response to stimuli. The body of the neuron resides in a ganglion near the spinal cord together with thousands of other neurons. The output from the dendrites of this neuron inside the spinal cord involve the release of the neurotransmitters, such as glutamate and substance P, and become the pain signals propagated by the spinal cord that are interpreted as signals of pain by the brain. Adapted from Reference 1 in the “References” section. FIG. 1B is a schematic representing a programmable genome editing treatment with a localized neurotropic viral vector to deliver an expression construct into the axon, exploiting the retrograde transport mechanisms to the nucleus of a dorsal root ganglion (DRG) neuron to modify one of the specialized genes that mediate the threshold or transmission of action potentials that are interpreted as pain (Table 12). FIG. 1C is a schematic representing the outcome (green arrows) of programmable genome editing treatment with a topologically localized neurotropic viral vector, for example, targeting the NaV1.7/SCN9a gene.

[0031] FIG. 2 shows exemplary, non-limiting representative examples of genome modifications using cytidine deaminase base editing, which can be applied to modify DRG neuron genes and afferent pain signals.

[0032] FIG. 3 shows a two-dimensional representation of the primary amino acid sequence of an isoform of NaV1.7/SCN9A, highlighting the transmembrane regions. The cirlces show non-limiting examples of variants that can be generated by genome modifications using cytidine deaminase base editing, which can be applied to modify the NaV1.7/SCN9A gene and afferent pain signals. The NaV1.7/Scn9A ion channel is shown as a non-limiting example of ion channels of DRG neurons. Other possible modifications, such as intron/exon junctions are not shown for clarity (see, e.g., FIG. 4).

[0033] FIGS. 4A-4B. FIG. 4A shows non-limiting examples of the results obtained from C→T base editing treatments using guide-RNAs targeted to the NaV1.7/SCN9A gene in the mouse Neuro-2a cell line, analysed using Illumina MiSeq high-throughput DNA sequencing. The treatments shown generate premature STOP codons or modify intron/exon junctions involved in mRNA splicing. FIG. 4B is a two-dimensional representation of the primary amino acid sequence of an isoform of mouse NaV1.7/SCN9A highlighting the sites targeted in panel A and other representative sites that can be targeted in the same manner (black). Additional possible modifications are not shown for clarity (see, e.g., FIG. 3).

[0034] FIGS. 5A-5B show representative plots obtained from C→T base editing treatments targeted to the NaV1.7/SCN9A gene in the mouse Neuro-2a cell line, analysed using Illumina MiSeq high-throughput DNA sequencing. FIG. 5A shows the S. pyogenes Cas9 DNA-binding domain fused to APOBEC and UGI (SpBE4), and FIG. 5B shows the KKH variant of the S. aureus Cas9 DNA-binding domain fused to APOBEC and UGI (KKH-SaBE3). The X axis sequence is underlined at the PAM and the end of the protospacer-targeting region is marked with a horizontal line. A dashed box highlights a target codon that is modified to a premature STOP codon by C to T base-editors acting on either the forward (coding) or reverse (template) strand of genomic DNA. The protospacer sequences in FIG. 5A correspond from top to bottom to SEQ ID NOs: 2447-2457, with 2457 repeated twice at the end.

[0035] FIGS. 6A-6C. FIG. 6A shows representative examples of the results obtained from active wild-type S. pyogenes Cas9 treatments using guide-RNAs targeted to the NaV1.7/SCN9A gene in the mouse Neuro-2a cell line, analysed using Illumina MiSeq high-throughput DNA sequencing. FIG. 6B is a gel electrophoresis analysis of PCR products following wild-type S. pyogenes Cas9 treatment using two or more guide-RNAs targeted to the NaV1.7/SCN9A gene in the mouse Neuro-2a cell line, which generate indels and longer deletions between the predicted target sites. The uncut genomic site (plus small indels) are seen as a high molecular-weight band, and large deletions are seen as the lower molecular-weight bands. FIG. 6C shows a representative analysis by Illumina MiSeq high-throughput DNA showing the large deletion product following wild-type S. pyogenes Cas9 treatment using two guide-RNAs, g3 and g12 from FIG. 6B, targeted to the NaV1.7/SCN9A gene in the mouse Neuro-2a cell line sequencing. The protospacer sequences in FIG. 6A correspond from top to bottom to SEQ ID NOs: 2458-2466 and 2457.

### DEFINITIONS

[0036] As used herein and in the claims, the singular forms “a,” “an,” and “the” include the singular and the plural reference unless the context clearly indicates otherwise. Thus, for example, a reference to “an agent” includes a single agent and a plurality of such agents.

[0037] A “dorsal root ganglion (DRG),” also referred to as a “spinal ganglion” or “posterior root ganglion,” is a cluster of nerve cell bodies (a ganglion) in the posterior root of a spinal nerve. A neuron in the DRG is referred to herein as a “dorsal root ganglia (DRG) neuron.” The dorsal root ganglia contain the cell bodies of sensory neurons.

[0038] A “neuron” is an electrically excitable cell that processes and transmits information through electrical and chemical signals. These signals between neurons occur via synapses, specialized connections with other cells. Neurons can connect to each other to form neural networks. Neurons are the core components of the brain and spinal cord of the central nervous system (CNS), and of the ganglia of the peripheral nervous system (PNS).

[0039] There are several types of specialized neurons: sensory neurons, motor neurons, and interneurons. A “sensory neuron” is a neuron that responds to stimuli such as touch, sound, or light, and all other stimuli affecting the cells of the sensory organs that then send signals to the spinal cord and brain. A “motor neuron” is a neuron that receives signals from the brain and spinal cord to cause muscle contractions and affect glandular outputs. A “interneuron” is a neuron that connects neurons to other neurons within the same region of the brain or spinal cord in neural networks.

[0040] In the PNS, an afferent nerve fiber is the axon of an afferent sensory neuron. It is a long process extending far from the nerve cell body that carries nerve impulses from sensory receptors or sense organs toward the central nervous system. The opposite direction of neural activity is termed efferent conduction.

[0041] Neurons are electrically excitable, maintaining voltage gradients across their membranes by means of metabolically driven ion pumps, which combine with ion channels embedded in the membrane to generate intracellular-versus-extracellular concentration differences of ions, such as sodium, potassium, chloride, and calcium. Changes in the cross-membrane voltage can alter the function of voltage-dependent ion channels. If the voltage changes by a large enough amount, an all-or-none electrochemical pulse called an action potential is generated, which travels rapidly along the cell's axon, and activates synaptic connections with other cells when it arrives.

[0042] An “ion channel” is a pore-forming membrane protein expressed on the surface of a cell (e.g., a DRG neuron). Ion channels on the surface of a cell (e.g., a DRG neuron) have various biological functions including: establishing a resting membrane potential, shaping action potentials and other electrical signals by gating the flow of ions across the cell membrane, controlling the flow of ions across secretory and epithelial cells, and regulating cell volume. Activated transmembrane ion channels allow ions into or out of cells. Genes encoding ion channels in DRG neurons that are responsible for propagation of pain are provided in Example 2.

[0043] “Hyperalgesia” is an increased sensitivity to pain, which may be caused by damage to nociceptors or peripheral nerves. Temporary increased sensitivity to pain also occurs as part of sickness behavior, the evolved response to infection. Long-term opioid (e.g. heroin, morphine) users and those on high-dose opioid medications for the treatment of chronic pain may experience hyperalgesia and experience pain out of proportion to physical findings, which is a common cause for loss of efficacy of these medications over time.

[0044] “Allodynia” refers to central pain sensitization (increased response of neurons) following normally non-painful, often repetitive, stimulation. Allodynia can lead to the triggering of a pain response from stimuli which do not normally provoke pain. Temperature or physical stimuli can provoke allodynia, which may feel like a burning sensation. Allodynia often occurs after injury to a site. Allodynia is different from hyperalgesia, an extreme, exaggerated reaction to a stimulus which is normally painful.

[0045] The term “loss-of-function mutation” or “inactivating mutation” refers to a mutation that results in the gene product having less or no function (being partially or wholly inactivated). When the allele has a complete loss of function (null allele), it is often called an amorphic mutation in the Muller's morphs schema. Phenotypes associated with such mutations are most often recessive. Exceptions are when the organism is haploid, or when the reduced dosage of a normal gene product is not enough for a normal phenotype (this is called haploinsufficiency).

[0046] The term “gain-of-function mutation” or “activating mutation” refers to a mutation that changes the gene product such that its effect gets stronger (enhanced activation) or even is superseded by a different and abnormal function. A gain of function mutation may also be referred to as a neomorphic mutation. When the new allele is created, a heterozygote containing the newly created allele as well as the original will express the new allele, genetically defining the mutations as dominant phenotypes.

[0047] The term “genome” refers to the genetic material of a cell or organism. It typically includes DNA (or RNA in the case of RNA viruses). The genome includes both the genes, the coding regions, the noncoding DNA, and the genomes of the mitochondria and chloroplasts. A genome does not typically include genetic material that is artificially introduced into a cell or organism, e.g., a plasmid that is transformed into a bacteria is not a part of the bacterial genome.

[0048] A “programmable DNA-binding protein” refers to DNA binding proteins that can be programmed to target to any desired nucleotide sequence within a genome. To program the DNA-binding protein to bind a desired nucleotide sequence, the DNA binding protein may be modified to change its binding specificity, e.g., zinc finger DNA-binding domain, zinc finger nuclease (ZFN), or transcription activator-like effector proteins (TALE). ZFNs are artificial restriction enzymes generated by fusing a zinc finger DNA-binding domain to a DNA-cleavage domain. Zinc finger domains can be engineered to target specific desired DNA sequences, and this enables zinc-fingers to bind unique sequences within complex genomes. Transcription activator-like effector nucleases (TALEN) are engineered restriction enzymes that can be engineered to cut specific sequences of DNA. They are made by fusing a TAL effector DNA-binding domain to a nuclease domain (e.g. Fok1). Transcription activator-like effectors (TALEs) can be engineered to bind practically any desired DNA sequence. Methods for programming ZFNs and TALEs are familiar to one skilled in the art. For example, such methods are described in Maeder et al., Mol. Cell 31 (2): 294-301, 2008; Carroll et al., Genetics Society of America, 188 (4): 773-782, 2011; Miller et al., Nature Biotechnology 25 (7): 778-785, 2007; Christian et al., Genetics 186 (2): 757-61, 2008; Li et al., Nucleic Acids Res. 39 (1): 359-372, 2010; and Moscou et al., Science 326 (5959): 1501, 2009, each of which are incorporated herein by reference.

[0049] A “guide nucleotide sequence-programmable DNA-binding protein” refers to a protein, a polypeptide, or a domain that is able to bind DNA, and the binding to its target DNA sequence is mediated by a guide nucleotide sequence. Thus, it is appreciated that the guide nucleotide sequence-programmable DNA-binding protein binds a guide nucleotide sequence. The “guide nucleotide” may be an RNA or DNA molecule (e.g., a single-stranded DNA or ssDNA molecule) that is complementary to the target sequence and can guide the DNA binding protein to the target sequence. As such, a guide nucleotide sequence-programmable DNA-binding protein may be a RNA-programmable DNA-binding protein (e.g., a Cas9 protein), or an ssDNA-programmable DNA-binding protein (e.g., an Argonaute protein). “Programmable” means the DNA-binding protein may be programmed to bind any DNA sequence that the guide nucleotide targets.

[0050] In some embodiments, the guide nucleotide sequence exists as a single nucleotide molecule and comprises two domains: (1) a domain that shares homology to a target nucleic acid (e.g., and directs binding of a guide nucleotide sequence-programmable DNA-binding protein to the target); and (2) a domain that binds a guide nucleotide sequence-programmable DNA-binding protein. In some embodiments, domain (2) corresponds to a sequence known as a tracrRNA and comprises a stem-loop structure. For example, in some embodiments, domain (2) is identical or homologous to a tracrRNA as provided in Jinek et al., Science 337:816-821(2012), which is incorporated herein by reference. Other examples of gRNAs (e.g., those including domain 2) can be found in U.S. Patent Application Publication US 2016/0208288 and U.S. Patent Application Publication US 2016/0200779, each of which is incorporated herein by reference.

[0051] Because the guide nucleotide sequence hybridizes to a target DNA sequence, the guide nucleotide sequence-programmable DNA-binding proteins are able to specifically bind, in principle, to any sequence complementary to the guide nucleotide sequence. Methods of using guide nucleotide sequence-programmable DNA-binding protein, such as Cas9, for site-specific editing of the genome (with or without cleaving the double stranded DNA) are known in the art (see e.g., Cong, L. et al. Multiplex genome engineering using CRISPR/Cas systems. Science 339, 819-823 (2013); Mali, P. et al. RNA-guided human genome engineering via Cas9. Science 339, 823-826 (2013); Hwang, W. Y. et al. Efficient genome editing in zebrafish using a CRISPR-Cas system. Nature Biotechnology 31, 227-229 (2013); Jinek, M. et al. RNA-programmed genome editing in human cells. eLife 2, e00471 (2013); Dicarlo, J. E. et al. Genome engineering in Saccharomyces cerevisiae using CRISPR-Cas systems. Nucleic Acids Research (2013); Jiang, W. et al. RNA-guided editing of bacterial genomes using CRISPR-Cas systems. Nature Biotechnology 31, 233-239 (2013); each of which is incorporated herein by reference).

[0052] As used herein, the term “Cas9” or “Cas9 nuclease” refers to an RNA-guided nuclease comprising a Cas9 protein, a fragment, or a variant thereof. A Cas9 nuclease is also referred to sometimes as a casn1 nuclease or a CRISPR (clustered regularly interspaced short palindromic repeat)-associated nuclease. CRISPR is an adaptive immune system that provides protection against mobile genetic elements (viruses, transposable elements and conjugative plasmids). CRISPR clusters contain spacers, sequences complementary to antecedent mobile elements, and target invading nucleic acids. CRISPR clusters are transcribed and processed into CRISPR RNA (crRNA). In type II CRISPR systems correct processing of pre-crRNA requires a trans-encoded small RNA (tracrRNA), endogenous ribonuclease 3 (rnc), and a Cas9 protein. The tracrRNA serves as a guide for ribonuclease 3-aided processing of pre-crRNA. Subsequently, Cas9/crRNA/tracrRNA endonucleolytically cleaves a linear or circular dsDNA target complementary to the spacer. The target strand not complementary to the crRNA is first cut endonucleolytically, then trimmed 3′-5′ exonucleolytically. In nature, DNA-binding and cleavage typically requires protein and both RNAs. However, single guide RNAs (“sgRNA”, or simply “gNRA”) can be engineered so as to incorporate aspects of both the crRNA and tracrRNA into a single RNA species. See, e.g., Jinek et al., Science 337:816-821(2012), which is incorporated herein by reference.

[0053] Cas9 nuclease sequences and structures are well known to those of skill in the art (see, e.g., Ferretti et al., Proc. Natl. Acad. Sci. 98:4658-4663(2001); Deltcheva E. et al., Nature 471:602-607(2011); and Jinek et al., Science 337:816-821(2012), each of which is incorporated herein by reference). Cas9 orthologs have been described in various species. Additional suitable Cas9 nucleases and sequences will be apparent to those of skill in the art based on this disclosure, and such Cas9 nucleases and sequences include Cas9 sequences from the organisms and loci disclosed in Chylinski et al., (2013) RNA Biology 10:5, 726-737; which are incorporated herein by reference. In some embodiments, wild type Cas9 corresponds to Cas9 from Streptococcus pyogenes (NCBI Reference Sequence: NC_002737.2, SEQ ID NO: 5 (nucleotide); and Uniport Reference Sequence: Q99ZW2, SEQ ID NO: 1 (amino acid).

(SEQ ID NO: 5)
ATGGATAAGAAATACTCAATAGGCTTAGATATCGGCACAAATAGCGTCGGATGGGCGGTGATCAC
TGATGAATATAAGGTTCCGTCTAAAAAGTTCAAGGTTCTGGGAAATACAGACCGCCACAGTATCA
AAAAAAATCTTATAGGGGCTCTTTTATTTGACAGTGGAGAGACAGCGGAAGCGACTCGTCTCAAA
CGGACAGCTCGTAGAAGGTATACACGTCGGAAGAATCGTATTTGTTATCTACAGGAGATTTTTTCA
AATGAGATGGCGAAAGTAGATGATAGTTTCTTTCATCGACTTGAAGAGTCTTTTTTGGTGGAAGAA
GACAAGAAGCATGAACGTCATCCTATTTTTGGAAATATAGTAGATGAAGTTGCTTATCATGAGAAA
TATCCAACTATCTATCATCTGCGAAAAAAATTGGTAGATTCTACTGATAAAGCGGATTTGCGCTTA
ATCTATTTGGCCTTAGCGCATATGATTAAGTTTCGTGGTCATTTTTTGATTGAGGGAGATTTAAATC
CTGATAATAGTGATGTGGACAAACTATTTATCCAGTTGGTACAAACCTACAATCAATTATTTGAAG
AAAACCCTATTAACGCAAGTGGAGTAGATGCTAAAGCGATTCTTTCTGCACGATTGAGTAAATCAA
GACGATTAGAAAATCTCATTGCTCAGCTCCCCGGTGAGAAGAAAAATGGCTTATTTGGGAATCTCA
TTGCTTTGTCATTGGGTTTGACCCCTAATTTTAAATCAAATTTTGATTTGGCAGAAGATGCTAAATT
ACAGCTTTCAAAAGATACTTACGATGATGATTTAGATAATTTATTGGCGCAAATTGGAGATCAATA
TGCTGATTTGTTTTTGGCAGCTAAGAATTTATCAGATGCTATTTTACTTTCAGATATCCTAAGAGTA
AATACTGAAATAACTAAGGCTCCCCTATCAGCTTCAATGATTAAACGCTACGATGAACATCATCAA
GACTTGACTCTTTTAAAAGCTTTAGTTCGACAACAACTTCCAGAAAAGTATAAAGAAATCTTTTTT
GATCAATCAAAAAACGGATATGCAGGTTATATTGATGGGGGAGCTAGCCAAGAAGAATTTTATAA
ATTTATCAAACCAATTTTAGAAAAAATGGATGGTACTGAGGAATTATTGGTGAAACTAAATCGTGA
AGATTTGCTGCGCAAGCAACGGACCTTTGACAACGGCTCTATTCCCCATCAAATTCACTTGGGTGA
GCTGCATGCTATTTTGAGAAGACAAGAAGACTTTTATCCATTTTTAAAAGACAATCGTGAGAAGAT
TGAAAAAATCTTGACTTTTCGAATTCCTTATTATGTTGGTCCATTGGCGCGTGGCAATAGTCGTTTT
GCATGGATGACTCGGAAGTCTGAAGAAACAATTACCCCATGGAATTTTGAAGAAGTTGTCGATAA
AGGTGCTTCAGCTCAATCATTTATTGAACGCATGACAAACTTTGATAAAAATCTTCCAAATGAAAA
AGTACTACCAAAACATAGTTTGCTTTATGAGTATTTTACGGTTTATAACGAATTGACAAAGGTCAA
ATATGTTACTGAAGGAATGCGAAAACCAGCATTTCTTTCAGGTGAACAGAAGAAAGCCATTGTTG
ATTTACTCTTCAAAACAAATCGAAAAGTAACCGTTAAGCAATTAAAAGAAGATTATTTCAAAAAA
ATAGAATGTTTTGATAGTGTTGAAATTTCAGGAGTTGAAGATAGATTTAATGCTTCATTAGGTACC
TACCATGATTTGCTAAAAATTATTAAAGATAAAGATTTTTTGGATAATGAAGAAAATGAAGATATC
TTAGAGGATATTGTTTTAACATTGACCTTATTTGAAGATAGGGAGATGATTGAGGAAAGACTTAAA
ACATATGCTCACCTCTTTGATGATAAGGTGATGAAACAGCTTAAACGTCGCCGTTATACTGGTTGG
GGACGTTTGTCTCGAAAATTGATTAATGGTATTAGGGATAAGCAATCTGGCAAAACAATATTAGAT
TTTTTGAAATCAGATGGTTTTGCCAATCGCAATTTTATGCAGCTGATCCATGATGATAGTTTGACAT
TTAAAGAAGACATTCAAAAAGCACAAGTGTCTGGACAAGGCGATAGTTTACATGAACATATTGCA
AATTTAGCTGGTAGCCCTGCTATTAAAAAAGGTATTTTACAGACTGTAAAAGTTGTTGATGAATTG
GTCAAAGTAATGGGGCGGCATAAGCCAGAAAATATCGTTATTGAAATGGCACGTGAAAATCAGAC
AACTCAAAAGGGCCAGAAAAATTCGCGAGAGCGTATGAAACGAATCGAAGAAGGTATCAAAGAA
TTAGGAAGTCAGATTCTTAAAGAGCATCCTGTTGAAAATACTCAATTGCAAAATGAAAAGCTCTAT
CTCTATTATCTCCAAAATGGAAGAGACATGTATGTGGACCAAGAATTAGATATTAATCGTTTAAGT
GATTATGATGTCGATCACATTGTTCCACAAAGTTTCCTTAAAGACGATTCAATAGACAATAAGGTC
TTAACGCGTTCTGATAAAAATCGTGGTAAATCGGATAACGTTCCAAGTGAAGAAGTAGTCAAAAA
GATGAAAAACTATTGGAGACAACTTCTAAACGCCAAGTTAATCACTCAACGTAAGTTTGATAATTT
AACGAAAGCTGAACGTGGAGGTTTGAGTGAACTTGATAAAGCTGGTTTTATCAAACGCCAATTGG
TTGAAACTCGCCAAATCACTAAGCATGTGGCACAAATTTTGGATAGTCGCATGAATACTAAATACG
ATGAAAATGATAAACTTATTCGAGAGGTTAAAGTGATTACCTTAAAATCTAAATTAGTTTCTGACT
TCCGAAAAGATTTCCAATTCTATAAAGTACGTGAGATTAACAATTACCATCATGCCCATGATGCGT
ATCTAAATGCCGTCGTTGGAACTGCTTTGATTAAGAAATATCCAAAACTTGAATCGGAGTTTGTCT
ATGGTGATTATAAAGTTTATGATGTTCGTAAAATGATTGCTAAGTCTGAGCAAGAAATAGGCAAA
GCAACCGCAAAATATTTCTTTTACTCTAATATCATGAACTTCTTCAAAACAGAAATTACACTTGCA
AATGGAGAGATTCGCAAACGCCCTCTAATCGAAACTAATGGGGAAACTGGAGAAATTGTCTGGGA
TAAAGGGCGAGATTTTGCCACAGTGCGCAAAGTATTGTCCATGCCCCAAGTCAATATTGTCAAGAA
AACAGAAGTACAGACAGGCGGATTCTCCAAGGAGTCAATTTTACCAAAAAGAAATTCGGACAAGC
TTATTGCTCGTAAAAAAGACTGGGATCCAAAAAAATATGGTGGTTTTGATAGTCCAACGGTAGCTT
ATTCAGTCCTAGTGGTTGCTAAGGTGGAAAAAGGGAAATCGAAGAAGTTAAAATCCGTTAAAGAG
TTACTAGGGATCACAATTATGGAAAGAAGTTCCTTTGAAAAAAATCCGATTGACTTTTTAGAAGCT
AAAGGATATAAGGAAGTTAAAAAAGACTTAATCATTAAACTACCTAAATATAGTCTTTTTGAGTTA
GAAAACGGTCGTAAACGGATGCTGGCTAGTGCCGGAGAATTACAAAAAGGAAATGAGCTGGCTCT
GCCAAGCAAATATGTGAATTTTTTATATTTAGCTAGTCATTATGAAAAGTTGAAGGGTAGTCCAGA
AGATAACGAACAAAAACAATTGTTTGTGGAGCAGCATAAGCATTATTTAGATGAGATTATTGAGC
AAATCAGTGAATTTTCTAAGCGTGTTATTTTAGCAGATGCCAATTTAGATAAAGTTCTTAGTGCAT
ATAACAAACATAGAGACAAACCAATACGTGAACAAGCAGAAAATATTATTCATTTATTTACGTTG
ACGAATCTTGGAGCTCCCGCTGCTTTTAAATATTTTGATACAACAATTGATCGTAAACGATATACG
TCTACAAAAGAAGTTTTAGATGCCACTCTTATCCATCAATCCATCACTGGTCTTTATGAAACACGC
ATTGATTTGAGTCAGCTAGGAGGTGACTGA
(SEQ ID NO: 1)
MDKKYSIGLDIGTNSVGWAVITDEYKVPSKKFKVLGNTDRHSIKKNLIGALLFDSGETAEATRLKRTARR
RYTRRKNRICYLQEIFSNEMAKVDDSFFHRLEESFLVEEDKKHERHPIFGNIVDEVAYHEKYPTIYHLR
KKLVDSTDKADLRLIYLALAHMIKFRGHFLIEGDLNPDNSDVDKLFIQLVQTYNQLFEENPINASGVDA
KAILSARLSKSRRLENLIAQLPGEKKNGLFGNLIALSLGLTPNFKSNFDLAEDAKLQLSKDTYDDDLDN
LLAQIGDQYADLFLAAKNLSDAILLSDILRVNTEITKAPLSASMIKRYDEHHQDLTLLKALVRQQLPEK
YKEIFFDQSKNGYAGYIDGGASQLEFYKFIKPILEKMDGTEELLVKLNREDLLRKQRTFDNGSIPHQIH
LGELHAILRRQEDFYPFLKDNREKIEKILTFRIPYYVGPLARGNSRFAWMTRKSEETITPWNFEEVVDK
GASAQSFIERMTNFDKNLPNEKVLPKHSLLYEYFTVYNELTKVKYVTEGMRKPAFLSGEQKKAIVDLLF
KTNRKVTVKQLKEDYFKKIECFDSVEISGVEDRFNASLGTYHDLLKIIKDKDFLDNEENEDILEDIVLT
LTLFEDREMIEERLKTYAHLFDDKVMKQLKRRRYTGWGRLSRKLINGIRDKQSGKTILDFLKSDGFANR
NFMQLIHDDSLTFKEDIQKAQVSGQGDSLHEHIANLAGSPAIKKGILQTVKVVDELVKVMGRHKPENIVI
EMARENQTTQKGQKNSRERMKRIEEGIKELGSQILKEHPVENTQLQNEKLYLYYLQNGRDMYVDQEL
DINRLSDYDVDHIVPQSFLKDDSIDNKVLTRSDKNRGKSDNVPSEEVVKKMKNYWRQLLNAKLITQRK
FDNLTKAERGGLSELDKAGFIKRQLVETRQITKHVAQILDSRMNTKYDENDKLIREVKVITLKSKLVSD
FRKDFQFYKVREINNYHHAHDAYLNAVVGTALIKKYPKLESEFVYGDYKVYDVRKMIAKSEQEIGKA
TAKYFFYSNIMNFFKTEITLANGEIRKRPLIETNGETGEIVWDKGRDFATVRKVLSMPQVNIVKKTEVQ
TGGFSKESILPKRNSDKLIARKKDWDPKKYGGFDSPTVAYSVLVVAKVEKGKSKKLKSVKELLGITIME
RSSFEKNPIDFLEAKGYKEVKKDLIIKLPKYSLFELENGRKRMLASAGELQKGNELALPSKYVNFLYLA
SHYEKLKGSPEDNEQKQLFVEQHKHYLDEIIEQISEFSKRVILADANLDKVLSAYNKHRDKPIREQAEN
IIHLFTLTNLGAPAAFKYFDTTIDRKRYTSTKEVLDATLIHQSITGLYETRIDLSQLGGD
(single underline: HNH domain; double underline: RuvC domain)

[0054] In some embodiments, wild type Cas9 corresponds to Cas9 from Streptococcus Aureus. S. aureus Cas9 wild type (SEQ ID NO: 6)

MKRNYILGLDIGITSVGYGIIDYETRDVIDAGVRLFKEANVENNE
GRRSKRGARRLKRRRRHRIQRVKKLLFDYNLLTDHSELSGINPYE
ARVKGLSQKLSEEEFSAALLHLAKRRGVHNVNEVEEDTGNELSTK
EQISRNSKALEEKYVAELQLERLKKDGEVRGSINRFKTSDYVKEA
KQLLKVQKAYHQLDQSFIDTYIDLLETRRTYYEGPGEGSPFGWKD
IKEWYEMLMGHCTYFPEELRSVKYAYNADLYNALNDLNNLVITRD
ENEKLEYYEKFQIIENVFKQKKKPTLKQIAKEILVNEEDIKGYRV
TSTGKPEFTNLKVYHDIKDITARKEIIENAELLDQIAKILTIYQS
SEDIQEELTNLNSELTQLEIEQISNLKGYTGTHNLSLKAINLILD
ELWHTNDNQIAIFNRLKLVPKKVDLSQQKEIPTTLVDDFILSPVV
KRSFIQSIKVINAIIKKYGLPNDIIIELAREKNSKDAQKMINEMQ
KRNRQTNERIEEIIRTTGKENAKYLIEKIKLHDMQEGKCLYSLEA
IPLEDLLNNPFNYEVDHIIPRSVSFDNSFNNKVLVKQEENSKKGN
RTPFQYLSSSDSKISYETFKKHILNLAKGKGRISKTKKEYLLEER
DINRFSVQKDFINRNLVDTRYATRGLMNLLRSYFRVNNLDVKVKS
INGGFTSFLRRKWKFKKERNKGYKHHAEDALIIANADFIFKEWKK
LDKAKKVMENQMFEEKQAESMPEIETEQEYKEIFITPHQIKHIKD
FKDYKYSHRVDKKPNRELINDTLYSTRKDDKGNTLIVNNLNGLYD
KDNDKLKKLINKSPEKLLMYHHDPQTYQKLKLIMEQYGDEKNPLY
KYYEETGNYLTKYSKKDNGPVIKKIKYYGNKLNAHLDITDDYPNS
RNKVVKLSLKPYRFDVYLDNGVYKFVTVKNLDVIKKENYYLVNSK
CYLEAKKLKKISNQAEFIASFYNNDLIKINGELYRVIGVNNDLLN
RIEVNMIDITYREYLENMNDKRPPRIIKTIASKTQSIKKYSTDIL
GNLYEVKSKKHPQIIKKG

[0055] In some embodiments, wild type Cas9 corresponds to Cas9 from Streptococcus thermophilus.

Streptococcus thermophilus wild type
CRISPR3 Cas9 (St3Cas9)
(SEQ ID NO: 7)
MTKPYSIGLDIGTNSVGWAVITDNYKVPSKKMKVLGNTSKKYIKKN
LLGVLLFDSGITAEGRRLKRTARRRYTRRRNRILYLQEIFSTEMAT
LDDAFFQRLDDSFLVPDDKRDSKYPIFGNLVEEKVYHDEFPTIYHL
RKYLADSTKKADLRLVYLALAHMIKYRGHFLIEGEFNSKNNDIQKN
FQDFLDTYNAIFESDLSLENSKQLEEIVKDKISKLEKKDRILKLFP
GEKNSGIFSEFLKLIVGNQADFRKCFNLDEKASLHFSKESYDEDLE
TLLGYIGDDYSDVFLKAKKLYDAILLSGFLTVTDNETEAPLSSAMI
KRYNEHKEDLALLKEYIRNISLKTYNEVFKDDTKNGYAGYIDGKTN
QEDFYVYLKNLLAEFEGADYFLEKIDREDFLRKQRTFDNGSIPYQI
HLQEMRAILDKQAKFYPFLAKNKERIEKILTFRIPYYVGPLARGNS
DFAWSIRKRNEKITPWNFEDVIDKESSAEAFINRMTSFDLYLPEEK
VLPKHSLLYETFNVYNELTKVRFIAESMRDYQFLDSKQKKDIVRLY
FKDKRKVTDKDIIEYLHAIYGYDGIELKGIEKQFNSSLSTYHDLLN
IINDKEFLDDSSNEAIIEEIIHTLTIFEDREMIKQRLSKFENIFDK
SVLKKLSRRHYTGWGKLSAKLINGIRDEKSGNTILDYLIDDGISNR
NFMQLIHDDALSFKKKIQKAQIIGDEDKGNIKEVVKSLPGSPAIKK
GILQSIKIVDELVKVMGGRKPESIVVEMARENQYTNQGKSNSQQRL
KRLEKSLKELGSKILKENIPAKLSKIDNNALQNDRLYLYYLQNGKD
MYTGDDLDIDRLSNYDIDHIIPQAFLKDNSIDNKVLVSSASNRGKS
DDFPSLEVVKKRKTFWYQLLKSKLISQRKFDNLTKAERGGLLPEDK
AGFIQRQLVETRQITKHVARLLDEKFNNKKDENNRAVRTVKIITLK
STLVSQFRKDFELYKVREINDFHHAHDAYLNAVIASALLKKYPKLE
PEFVYGDYPKYNSFRERKSATEKVYFYSNIMNIFKKSISLADGRVI
ERPLIEVNEETGESVWNKESDLATVRRVLSYPQVNVVKKVEEQNHG
LDRGKPKGLFNANLSSKPKPNSNENLVGAKEYLDPKKYGGYAGISN
SFAVLVKGTIEKGAKKKITNVLEFQGISILDRINYRKDKLNFLLEK
GYKDIELIIELPKYSLFELSDGSRRMLASILSTNNKRGEIHKGNQI
FLSQKFVKLLYHAKRISNTINENHRKYVENHKKEFEELFYYILEFN
ENYVGAKKNGKLLNSAFQSWQNHSIDELCSSFIGPTGSERKGLFEL
TSRGSAADFEFLGVKIPRYRDYTPSSLLKDATLIHQSVTGLYETRI
DLAKLGEG
Streptococcus thermophilus CRISPR1 Cas9
wild type (St1Cas9)
(SEQ ID NO: 8)
MSDLVLGLDIGIGSVGVGILNKVTGEIIHKNSRIFPAAQAENNLV
RRTNRQGRRLTRRKKHRRVRLNRLFEESGLITDFTKISINLNPYQ
LRVKGLTDELSNEELFIALKNMVKHRGISYLDDASDDGNSSIGDY
AQIVKENSKQLETKTPGQIQLERYQTYGQLRGDFTVEKDGKKHRL
INVFPTSAYRSEALRILQTQQEFNPQITDEFINRYLEILTGKRKY
YHGPGNEKSRTDYGRYRTSGETLDNIFGILIGKCTFYPDEFRAAK
ASYTAQEFNLLNDLNNLTVPTETKKLSKEQKNQIINYVKNEKAMG
PAKLFKYIAKLLSCDVADIKGYRIDKSGKAEIHTFEAYRKMKTLE
TLDIEQMDRETLDKLAYVLTLNTEREGIQEALEHEFADGSFSQKQ
VDELVQFRKANSSIFGKGWHNFSVKLMMELIPELYETSEEQMTIL
TRLGKQKTTSSSNKTKYIDEKLLTEEIYNPVVAKSVRQAIKIVNA
AIKEYGDFDNIVIEMARETNEDDEKKAIQKIQKANKDEKDAAMLK
AANQYNGKAELPHSVFHGHKQLATKIRLWHQQGERCLYTGKTISI
HDLINNSNQFEVDHILPLSITFDDSLANKVLVYATANQEKGQRTP
YQALDSMDDAWSFRELKAFVRESKTLSNKKKEYLLTEEDISKFDV
RKKFIERNLVDTRYASRVVLNALQEHFRAHKIDTKVSVVRGQFTS
QLRRHWGIEKTRDTYHHHAVDALIIAASSQLNLWKKQKNTLVSYS
EDQLLDIETGELISDDEYKESVFKAPYQHFVDTLKSKEFEDSILF
SYQVDSKFNRKISDATIYATRQAKVGKDKADETYVLGKIKDIYTQ
DGYDAFMKIYKKDKSKFLMYRHDPQTFEKVIEPILENYPNKQINE
KGKEVPCNPFLKYKEEHGYIRKYSKKGNGPEIKSLKYYDSKLGNH
IDITPKDSNNKVVLQSVSPWRADVYFNKTTGKYEILGLKYADLQF
EKGTGTYKISQEKYNDIKKKEGVDSDSEFKFTLYKNDLLLVKDTE
TKEQQLFRFLSRTMPKQKHYVELKPYDKQKFEGGEALIKVLGNVA
NSGQCKKGLGKSNISIYKVRTDVLGNQHIIKNEGDKPKLDF

[0056] In some embodiments, the Cas9 domain of any of the fusion proteins provided herein is a Cas9 from archaea (e.g. nanoarchaea), which constitute a domain and kingdom of single-celled prokaryotic microbes. In some embodiments, the Cas9 domain is CasX or CasY, which have been described in, for example, Burstein et al., “New CRISPR-Cas systems from uncultivated microbes.” Cell Res. 2017 Feb. 21. doi: 10.1038/cr.2017.21, which is incorporated herein by reference. Using genome-resolved metagenomics, a number of CRISPR-Cas systems were identified, including the first reported Cas9 in the archaeal domain of life. This divergent Cas9 protein was found in nanoarchaea as part of an active CRISPR-Cas system. In bacteria, two previously unknown systems were discovered, CRISPR-CasX and CRISPR-CasY, which are among the most compact systems yet discovered. In some embodiments, Cas9 refers to CasX, or a variant of CasX. In some embodiments, Cas9 refers to a CasY, or a variant of CasY. It should be appreciated that other RNA-guided DNA binding proteins may be used as a nucleic acid programmable DNA binding protein (napDNAbp) and are within the scope of this disclosure.

[0057] In some embodiments, the Cas9 domain comprises an amino acid sequence that is at least 85%, at least 90%, at least 91%, at least 92%, at least 93%, at least 94%, at least 95%, at least 96%, at least 97%, at least 98%, at least 99%, or at least 99.5% identical to a naturally-occurring CasX or CasY protein. In some embodiments, the Cas9 domain is a naturally-occurring CasX or CasY protein. In some embodiments, the Cas9 domain comprises an amino acid sequence that is at least 85%, at least 90%, at least 91%, at least 92%, at least 93%, at least 94%, at least 95%, at least 96%, at least 97%, at least 98%, at least 99%, or at least 99.5% identical to any one of SEQ ID NOs: 336-337 or 3000. In some embodiments, the Cas9 domain comprises an amino acid sequence of any one SEQ ID NOs: 336-337 or 3000. It should be appreciated that CasX and CasY from other bacterial species may also be used in accordance with the present disclosure.

[0058] In some embodiments, wild-type Cas9 refers to CasX from Sulfolobus islandicus (strain REY15A).

(SEQ ID NO: 336)
MEVPLYNIFGDNYIIQVATEAENSTIYNNKVEIDDEELRNVLNLAY
KIAKNNEDAAAERRGKAKKKKGLEGETTTSNIILPLSGNDKNPWTE
TLKCYNFPTTVALSEVFKNFSQVKECEEVSAPSFVKPEFYKFGRSP
GMVERTRRVKLEVEPHYLIMAAAGWVLTRLGKAKVSEGDYVGVNVF
TPTRGILYSLIQNVNGIVPGIKPETAFGLWIARKVVSSVTNPNVSV
VSIYTISDAVGQNPTTINGGFSIDLTKLLEKRDLLSERLEAIARNA
LSISSNMRERYIVLANYIYEYLTGSKRLEDLLYFANRDLIMNLNSD
DGKVRDLKLISAYVNGELIRGEG

[0059] In some embodiments, wild-type Cas9 refers to CasX from Sulfolobus islandicus (strain REY15A).

(SEQ ID NO: 337)
MEVPLYNIFGDNYIIQVATEAENSTIYNNKVEIDDEELRNVLNLAY
KIAKNNEDAAAERRGKAKKKKGLEGETTTSNIILPLSGNDKNPWTE
TLKCYNFPTTVALSEVFKNFSQVKECEEVSAPSFVKPEFYEFGRSP
GMVERTRRVKLEVEPHYLIIAAAGWVLTRLGKAKVSEGDYVGVNVF
TPTRGILYSLIQNVNGIVPGIKPETAFGLWIARKVVSSVTNPNVSV
VRIYTISDAVGQNPTTINGGFSIDLTKLLEKRYLLSERLEAIARNA
LSISSNMRERYIVLANYIYEYLTGSKRLEDLLYFANRDLIMNLNSD
DGKVRDLKLISAYVNGELIRGEG

[0060] In some embodiments, wild-type Cas9 refers to CasY from a Parcubacteria group bacterium.

CasY (ncbi.nlm.nih.gov/protein/APG80656.1)
>APG80656.1 CRISPR-associated protein CasY
[uncultured Parcubacteria group bacterium]
(SEQ ID NO: 2469)
MSKRHPRISGVKGYRLHAQRLEYTGKSGAMRTIKYPLYSSPSGGRTV
PREIVSAINDDYVGLYGLSNFDDLYNAEKRNEEKVYSVLDFWYDCVQ
YGAVFSYTAPGLLKNVAEVRGGSYELTKTLKGSHLYDELQIDKVIKF
LNKKEISRANGSLDKLKKDIIDCFKAEYRERHKDQCNKLADDIKNAK
KDAGASLGERQKKLFRDFFGISEQSENDKPSFTNPLNLTCCLLPFDT
VNNNRNRGEVLFNKLKEYAQKLDKNEGSLEMWEYIGIGNSGTAFSNF
LGEGFLGRLRENKITELKKAMMDITDAWRGQEQEEELEKRLRILAAL
TIKLREPKFDNHWGGYRSDINGKLSSWLQNYINQTVKIKEDLKGHKK
DLKKAKEMINRFGESDTKEEAVVSSLLESIEKIVPDDSADDEKPDIP
AIAIYRRFLSDGRLTLNRFVQREDVQEALIKERLEAEKKKKPKKRKK
KSDAEDEKETIDFKELFPHLAKPLKLVPNFYGDSKRELYKKYKNAAI
YTDALWKAVEKIYKSAFSSSLKNSFFDTDFDKDFFIKRLQKIFSVYR
RFNTDKWKPIVKNSFAPYCDIVSLAENEVLYKPKQSRSRKSAAIDKN
RVRLPSTENIAKAGIALARELSVAGFDWKDLLKKEEHEEYIDLIELH
KTALALLLAVTETQLDISALDFVENGTVKDFMKTRDGNLVLEGRFLE
MFSQSIVFSELRGLAGLMSRKEFITRSAIQTMNGKQAELLYIPHEFQ
SAKITTPKEMSRAFLDLAPAEFATSLEPESLSEKSLLKLKQMRYYPH
YFGYELTRTGQGIDGGVAENALRLEKSPVKKREIKCKQYKTLGRGQN
KIVLYVRSSYYQTQFLEWFLHRPKNVQTDVAVSGSFLIDEKKVKTRW
NYDALTVALEPVSGSERVFVSQPFTIFPEKSAELEGQRYLGIDIGEY
GIAYTALEITGDSAKILDQNFISDPQLKTLREEVKGLKLDQRRGTFA
MPSTKIARIRESLVHSLRNRIHHLALKHKAKIVYELEVSRFEEGKQK
IKKVYATLKKADVYSEIDADKNLQTTVWGKLAVASEISASYTSQFCG
ACKKLWRAEMQVDETITTQELIGTVRVIKGGTLIDAIKDFMRPPIFD
ENDTPFPKYRDFCDKHHISKKMRGNSCLFICPFCRANADADIQASQT
IALLRYVKEEKKVEDYFERFRKLKNIKVLGQMKKI

[0061] In some embodiments, Cas9 refers to Cas9 from: Corynebacterium ulcerans (NCBI Refs: NC_015683.1, NC_017317.1); Corynebacterium diphtheria (NCBI Refs: NC_016782.1, NC_016786.1); Spiroplasma syrphidicola (NCBI Ref: NC_021284.1); Prevotella intermedia (NCBI Ref: NC_017861.1); Spiroplasma taiwanense (NCBI Ref: NC_021846.1); Streptococcus iniae (NCBI Ref: NC_021314.1); Belliella baltica (NCBI Ref: NC_018010.1); Psychroflexus torquisl (NCBI Ref: NC_018721.1); Listeria innocua (NCBI Ref: NP_472073.1); Campylobacter jejuni (NCBI Ref: YP_002344900.1); or Neisseria. meningitidis (NCBI Ref: YP_002342100.1) or to a Cas9 from any of the organisms listed in Example 1 (SEQ ID NOs: 11-260).

[0062] To be used as in the fusion protein of the present disclosure as the guide nucleotide sequence-programmable DNA binding protein domain, a Cas9 protein needs to be nuclease inactive. A nuclease-inactive Cas9 protein may interchangeably be referred to as a “dCas9” protein (for nuclease-“dead” Cas9). Methods for generating a Cas9 protein (or a fragment thereof) having an inactive DNA cleavage domain are known (See, e.g., Jinek et al., Science. 337:816-821(2012); Qi et al., (2013) Cell. 28; 152(5):1173-83, each of which are incorporated herein by reference). For example, the DNA cleavage domain of Cas9 is known to include two subdomains, the HNH nuclease subdomain and the RuvC1 subdomain. The HNH subdomain cleaves the strand complementary to the gRNA, whereas the RuvC1 subdomain cleaves the non-complementary strand. Mutations within these subdomains can silence the nuclease activity of Cas9. For example, the mutations D10A and H840A completely inactivate the nuclease activity of S. pyogenes Cas9 (Jinek et al., Science. 337:816-821(2012); Qi et al., Cell. 28; 152(5):1173-83 (2013)).

dCas9 (D10A and H840A)
(SEQ ID NO: 2)
MDKKYSIGLAIGTNSVGWAVITDEYKVPSKKFKVLGNTDRHSIKKNLIGALLFDSGETAEATRLKRTAR
RRYTRRKNRICYLQEIFSNEMAKVDDSFFHRLEESFLVEEDKKHERHPIFGNIVDEVAYHEKYPTIYHLR
KKLVDSTDKADLRLIYLALAHMIKFRGHFLIEGDLNPDNSDVDKLFIQLVQTYNQLFEENPINASGVDA
KAILSARLSKSRRLENLIAQLPGEKKNGLFGNLIALSLGLTPNFKSNFDLAEDAKLQLSKDTYDDDLDN
LLAQIGDQYADLFLAAKNLSDAILLSDILRVNTEITKAPLSASMIKRYDEHHQDLTLLKALVRQQLPEK
YKEIFFDQSKNGYAGYIDGGASQEEFYKFIKPILEKMDGTEELLVKLNREDLLRKQRTFDNGSIPHQIHL
GELHAILRRQEDFYPFLKDNREKIEKILTFRIPYYVGPLARGNSRFAWMTRKSEETITPWNFEEVVDKGA
SAQSFIERMTNFDKNLPNEKVLPKHSLLYEYFTVYNELTKVKYVTEGMRKPAFLSGEQKKAIVDLLFK
TNRKVTVKQLKEDYFKKIECFDSVEISGVEDRFNASLGTYHDLLKIIKDKDFLDNEENEDILEDIVLTLT
LFEDREMIEERLKTYAHLFDDKVMKQLKRRRYTGWGRLSRKLINGIRDKQSGKTILDFLKSDGFANRN
FMQLIHDDSLTFKEDIQKAQVSGQGDSLHEHIANLAGSPAIKKGILQTVKVVDELVKVMGRHKPENIVI
EMARENQTTQKGQKNSRERMKRIEEGIKELGSQILKEHPVENTQLQNEKLYLYYLQNGRDMYVDQEL
DINRLSDYDVDAIVPQSFLKDDSIDNKVLTRSDKNRGKSDNVPSEEVVKKMKNYWRQLLNAKLITQRK
FDNLTKAERGGLSELDKAGFIKRQLVETRQITKHVAQILDSRMNTKYDENDKLIREVKVITLKSKLVSD
FRKDFQFYKVREINNYHHAHDAYLNAVVGTALIKKYPKLESEFVYGDYKVYDVRKMIAKSEQEIGKA
TAKYFFYSNIMNFFKTEITLANGEIRKRPLIETNGETGEIVWDKGRDFATVRKVLSMPQVNIVKKTEVQ
TGGFSKESILPKRNSDKLIARKKDWDPKKYGGFDSPTVAYSVLVVAKVEKGKSKKLKSVKELLGITIME
RSSFEKNPIDFLEAKGYKEVKKDLIIKLPKYSLFELENGRKRMLASAGELQKGNELALPSKYVNFLYLA
SHYEKLKGSPEDNEQKQLFVEQHKHYLDEIIEQISEFSKRVILADANLDKVLSAYNKHRDKPIREQAENI
IHLFTLTNLGAPAAFKYFDTTIDRKRYTSTKEVLDATLIHQSITGLYETRIDLSQLGGD
(single underline: HNH domain; double underline: RuvC domain)

[0063] The dCas9 of the present disclosure encompasses completely inactive Cas9 or partially inactive Cas9. For example, the dCas9 may have one of the two nuclease domain inactivated, while the other nuclease domain remains active. Such a partially active Cas9 may also be referred to as a Cas9 nickase, due to its ability to cleave one strand of the targeted DNA sequence. The Cas9 nickase suitable for use in accordance with the present disclosure has an active HNH domain and an inactive RuvC domain and is able to cleave only the strand of the target DNA that is bound by the sgRNA (which is the opposite strand of the strand that is being edited via cytidine deamination). The Cas9 nickase of the present disclosure may comprise mutations that inactivate the RuvC domain, e.g., a D10A mutation. It is to be understood that any mutation that inactivates the RuvC domain may be included in a Cas9 nickase, e.g., insertion, deletion, or single or multiple amino acid substitution in the RuvC domain. In a Cas9 nickase useful in the present disclosure, while the RuvC domain is inactivated, the HNH domain remains activate. Thus, while the Cas9 nickase may comprise mutations other than those that inactivate the RuvC domain (e.g., D10A), those mutations do not affect the activity of the HNH domain. In a non-limiting Cas9 nickase example, the histidine at position 840 remains unchanged. The sequence of an exemplary Cas9 nickase suitable for the present disclosure is provided below.

S. pyogenes Cas9 Nickase (D10A)
(SEQ ID NO: 3)
MDKKYSIGLAIGTNSVGWAVITDEYKVPSKKFKVLGNTDRHSIKKNLIGALLFDSGETAEATRLKRTAR
RRYTRRKNRICYLQEIFSNEMAKVDDSFFHRLEESFLVEEDKKHERHPIFGNIVDEVAYHEKYPTIYHLR
KKLVDSTDKADLRLIYLALAHMIKFRGHFLIEGDLNPDNSDVDKLFIQLVQTYNQLFEENPINASGVDA
KAILSARLSKSRRLENLIAQLPGEKKNGLFGNLIALSLGLTPNFKSNFDLAEDAKLQLSKDTYDDDLDN
LLAQIGDQYADLFLAAKNLSDAILLSDILRVNTEITKAPLSASMIKRYDEHHQDLTLLKALVRQQLPEKY
KEIFFDQSKNGYAGYIDGGASQEEFYKFIKPILEKMDGTEELLVKLNREDLLRKQRTFDNGSIPHQIHL
GELHAILRRQEDFYPFLKDNREKIEKILTFRIPYYVGPLARGNSRFAWMTRKSEETITPWNFEEVVDKGA
SAQSFIERMTNFDKNLPNEKVLPKHSLLYEYFTVYNELTKVKYVTEGMRKPAFLSGEQKKAIVDLLFKT
NRKVTVKQLKEDYFKKIECFDSVEISGVEDRFNASLGTYHDLLKIIKDKDFLDNEENEDILEDIVLTLT
LFEDREMIEERLKTYAHLFDDKVMKQLKRRRYTGWGRLSRKLINGIRDKQSGKTILDFLKSDGFANRN
FMQLIHDDSLTFKEDIQKAQVSGQGDSLHEHIANLAGSPAIKKGILQTVKVVDELVKVMGRHKPENIVI
EMARENQTTQKGQKNSRERMKRIEEGIKELGSQILKEHPVENTQLQNEKLYLYYLQNGRDMYVDQEL
DINRLSDYDVDHIVPQSFLKDDSIDNKVLTRSDKNRGKSDNVPSEEVVKKMKNYWRQLLNAKLITQRK
FDNLTKAERGGLSELDKAGFIKRQLVETRQITKHVAQILDSRMNTKYDENDKLIREVKVITLKSKLVSD
FRKDFQFYKVREINNYHHAHDAYLNAVVGTALIKKYPKLESEFVYGDYKVYDVRKMIAKSEQEIGKA
TAKYFFYSNIMNFFKTEITLANGEIRKRPLIETNGETGEIVWDKGRDFATVRKVLSMPQVNIVKKTEVQ
TGGFSKESILPKRNSDKLIARKKDWDPKKYGGFDSPTVAYSVLVVAKVEKGKSKKLKSVKELLGITIM
ERSSFEKNPIDFLEAKGYKEVKKDLIIKLPKYSLFELENGRKRMLASAGELQKGNELALPSKYVNFLY
LASHYEKLKGSPEDNEQKQLFVEQHKHYLDEIIEQISEFSKRVILADANLDKVLSAYNKHRDKPIREQ
AENIIHLFTLTNLGAPAAFKYFDTTIDRKRYTSTKEVLDATLIHQSITGLYETRIDLSQLGGD
(single underline: HNH domain; double underline: RuvC domain)
S. aureus Cas9 Nickase (D10A)
(SEQ ID NO: 4)
MKRNYILGLAIGITSVGYGIIDYETRDVIDAGVRLFKEANVENNEGRRSKRGARRLKRRRRHRIQRVKK
LLFDYNLLTDHSELSGINPYEARVKGLSQKLSEEEFSAALLHLAKRRGVHNVNEVEEDTGNELSTKEQI
SRNSKALEEKYVAELQLERLKKDGEVRGSINRFKTSDYVKEAKQLLKVQKAYHQLDQSFIDTYIDLLE
TRRTYYEGPGEGSPFGWKDIKEWYEMLMGHCTYFPEELRSVKYAYNADLYNALNDLNNLVITRDENEKL
EYYEKFQIIENVFKQKKKPTLKQIAKEILVNEEDIKGYRVTSTGKPEFTNLKVYHDIKDITARKEIIEN
AELLDQIAKILTIYQSSEDIQEELTNLNSELTQLEIEQISNLKGYTGTHNLSLKAINLILDELWHTNDNQ
IAIFNRLKLVPKKVDLSQQKEIPTTLVDDFILSPVVKRSFIQSIKVINAIIKKYGLPNDIIIELAREKNS
KDAQKMINEMQKRNRQTNERIEEIIRTTGKENAKYLIEKIKLHDMQEGKCLYSLEAIPLEDLLNNPFNYL
VDHIIPRSVSFDNSFNNKVLVKQEENSKKGNRTPFQYLSSSDSKISYETFKKHILNLAKGKGRISKTKKE
YLLEERDINRFSVQKDFINRNLVDTRYATRGLMNLLRSYFRVNNLDVKVKSINGGFTSFLRRKWKFKKER
NKGYKHHAEDALIIANADFIFKEWKKLDKAKKVMENQMFEEKQAESMPEIETEQEYKEIFITPHQIKHI
KDFKDYKYSHRVDKKPNRELINDTLYSTRKDDKGNTLIVNNLNGLYDKDNDKLKKLINKSPEKLLMYHH
DPQTYQKLKLIMEQYGDEKNPLYKYYEETGNYLTKYSKKDNGPVIKKIKYYGNKLNAHLDITDDYPNSR
NKVVKLSLKPYRFDVYLDNGVYKFVTVKNLDVIKKENYYLVNSKCYLEAKKLKKISNQAEFIASFYNND
LIKINGELYRVIGVNNDLLNRIEVNMIDITYREYLENMNDKRPPRIIKTIASKTQSIKKYSTDILGNLY
EVKSKKHPQIIKKG

[0064] It is appreciated that when the term “dCas9” or “nuclease-inactive Cas9” is used herein, it refers to Cas9 variants that are inactive in both HNH and RuvC domains as well as Cas9 nickases. For example, the dCas9 may include the amino acid sequence set forth in SEQ ID NO: 2 or SEQ ID NO: 3. In some embodiments, the dCas9 may comprise other mutations that inactivate RuvC or HNH domain. Additional suitable mutations that inactivate Cas9 will be apparent to those of skill in the art based on this disclosure and knowledge in the field, and are within the scope of this disclosure. Such additional exemplary suitable nuclease-inactive Cas9 domains include, but are not limited to, D839A and/or N863A (See, e.g., Prashant et al., Nature Biotechnology. 2013; 31(9): 833-838, which are incorporated herein by reference), or K603R (See, e.g., Chavez et al., Nature Methods 12, 326-328, 2015, which is incorporated herein by reference). The term Cas9, dCas9, or Cas9 variant also encompasses Cas9, dCas9, or Cas9 variants from any organism. Also appreciated is that dCas9, Cas9 nickase, or other appropriate Cas9 variants from any organisms may be used in accordance with the present disclosure.

[0065] A “deaminase” refers to an enzyme that catalyzes the removal of an amine group from a molecule, or deamination, for example through hydrolysis. In some embodiments, the deaminase is a cytidine deaminase, catalyzing the deamination of cytidine (C) to uridine (U), deoxycytidine (dC) to deoxyuridine (dU), or 5-methyl-cytidine to thymidine (T, 5-methyl-U), respectively. Subsequent DNA repair mechanisms ensure that a dU is replaced by T, as described in Komor et al (Nature, Programmable editing of a target base in genomic DNA without double-stranded DNA cleavage, 533, 420-424 (2016), which is incorporated herein by reference). In some embodiments, the deaminase is a cytosine deaminase, catalyzing and promoting the conversion of cytosine to uracil (e.g., in RNA) or thymine (e.g., in DNA). In some embodiments, the deaminase is a naturally-occurring deaminase from an organism, such as a human, chimpanzee, gorilla, monkey, cow, dog, rat, or mouse. In some embodiments, the deaminase is a variant of a naturally-occurring deaminase from an organism, and the variants do not occur in nature. For example, in some embodiments, the deaminase or deaminase domain is at least 50%, at least 55%, at least 60%, at least 65%, at least 70%, at least 75% at least 80%, at least 85%, at least 90%, at least 95%, at least 96%, at least 97%, at least 98%, at least 99%, or at least 99.5% identical to a naturally-occurring deaminase from an organism.

[0066] A “cytosine deaminase” refers to an enzyme that catalyzes the chemical reaction “cytosine+H₂O→uracil+NH₃” or “5-methyl-cytosine+H₂O→thymine+NH₃.” As it may be apparent from the reaction formula, such chemical reactions result in a C to U/T nucleobase change. In the context of a gene, such nucleotide change, or mutation, may in turn lead to an amino acid change in the protein, which may affect the protein's function, e.g., loss-of-function or gain-of-function. Subsequent DNA repair mechanisms ensure that uracil bases in DNA are replaced by T, as described in Komor et al (Nature, Programmable editing of a target base in genomic DNA without double-stranded DNA cleavage, 533, 420-424 (2016), which is incorporated herein by reference).

[0067] One exemplary suitable class of cytosine deaminases is the apolipoprotein B mRNA-editing complex (APOBEC) family of cytosine deaminases encompassing eleven proteins that serve to initiate mutagenesis in a controlled and beneficial manner. The apolipoprotein B editing complex 3 (APOBEC3) enzyme provides protection to human cells against a certain HIV-1 strain via the deamination of cytosines in reverse-transcribed viral ssDNA. These cytosine deaminases all require a Zn²⁺-coordinating motif (His-X-Glu-X₂₃₋₂₆-Pro-Cys-X₂₋₄-Cys; SEQ ID NO: 1996) and bound water molecule for catalytic activity. The glutamic acid residue acts to activate the water molecule to a zinc hydroxide for nucleophilic attack in the deamination reaction. Each family member preferentially deaminates at its own particular “hotspot,” for example, WRC (W is A or T, R is A or G) for hAID, or TTC for hAPOBEC3F. A recent crystal structure of the catalytic domain of APOBEC3G revealed a secondary structure comprising a five-stranded (3-sheet core flanked by six α-helices, which is believed to be conserved across the entire family. The active center loops have been shown to be responsible for both ssDNA binding and in determining “hotspot” identity. Overexpression of these enzymes has been linked to genomic instability and cancer, thus highlighting the importance of sequence-specific targeting. Another suitable cytosine deaminase is the activation-induced cytidine deaminase (AID), which is responsible for the maturation of antibodies by converting cytosines in ssDNA to uracils in a transcription-dependent, strand-biased fashion.

[0068] The term “base editors” or “nucleobase editors,” as used herein, broadly refer to any of the fusion proteins described herein. In some embodiments, the nucleobase editors are capable of precisely deaminating a target base to convert it to a different base, e.g., the base editor may target C bases in a nucleic acid sequence and convert the C to T base. For example, in some embodiments, the base editor may be a cytosine deaminase-dCas9 fusion protein. In some embodiments, the base editor may be a cytosine deaminase-Cas9 nickase fusion protein. In some embodiments, the base editor may be a deaminase-dCas9-UGI fusion protein. In some embodiments, the base editor may be an UGI-deaminase-dCas9 fusion protein. In some embodiments, the base editor may be an UGI-deaminase-Cas9 nickase fusion protein. In some embodiments, the base editor may be an APOBEC1-dCas9-UGI fusion protein. In some embodiments, the base editor may be an APOBEC1-Cas9 nickase-UGI fusion protein. In some embodiments, the base editor may be an APOBEC1-dCpf1-UGI fusion protein. In some embodiments, the base editor may be an APOBEC1-dNgAgo-UGI fusion protein. In some embodiments, the base editor may comprise a second UGI domain. Non-limiting exemplary sequences of the nucleobase editors useful in the present disclosure are provided in Example 1, SEQ ID NOs: 293-302 and 2495. Such nucleobase editors and methods of using them for genome editing have been described in the art, e.g., in U.S. Pat. No. 9,068,179, US Patent Application Publications US 2015/0166980, US 2015/0166981, US 2015/0166982, US20150166984, and US20150165054, and US Provisional applications, U.S. Ser. No. 62/245,828, filed Oct. 23, 2015; 62/279,346, filed Jan. 15, 2016; 62/311,763, filed Mar. 22, 2016; 62/322,178, filed Apr. 13, 2016, 62/357,352, filed Jun. 30, 2016, 62/370,700, filed Aug. 3, 2016; 62/398,490, filed Sep. 22, 2016; 62/408,686, filed Oct. 14, 2016; PCT Application PCT/US2016/058344, filed Oct. 22, 2016; U.S. patent application Ser. No. 15/311,852, filed Oct. 22, 2016; Komor et al. (2017) Improved Base Excision Repair Inhibition and Bateriophage Mu Gam Protein Yields C:G-to-T:A base editors with higher efficiency and product purity. Sci Adv, 3: eaao4774; and in Komor et al., Nature, Programmable editing of a target base in genomic DNA without double-stranded DNA cleavage, 533, 420-424 (2016), the entire contents of each of which is incorporated herein by reference.

[0069] The term “target site” or “target sequence” refers to a sequence within a nucleic acid molecule (e.g., a DNA molecule) that is deaminated by the fusion protein provided herein. In some embodiments, the target sequence is a polynucleotide (e.g., a DNA), wherein the polynucleotide comprises a coding strand and a complementary strand. The meaning of a “coding strand” and “complementary strand,” as used herein, is the same as the common meaning of the terms in the art. In some embodiments, the target sequence is a sequence in the genome of a mammal. In some embodiments, the target sequence is a sequence in the genome of a human. In some embodiments, the target sequence is a sequence in the genome of a non-human animal The term “target codon” refers to the amino acid codon that is edited by the base editor and converted to a different codon via deamination. The term “target base” refers to the nucleotide base that is edited by the base editor and converted to a different base via deamination. In some embodiments, the target codon in the coding strand is edited (e.g., deaminated). In some embodiments, the target codon in the complimentary strand is edited (e.g., deaminated).

[0070] The term “linker,” as used herein, refers to a chemical group or a molecule linking two molecules or moieties, e.g., two domains of a fusion protein, such as, for example, a nuclease-inactive Cas9 domain and a nucleic acid editing domain (e.g., a deaminase domain). Typically, the linker is positioned between, or flanked by, two groups, molecules, domains, or other moieties and connected to each one via a covalent bond, thus connecting the two. In some embodiments, the linker is an amino acid or a plurality of amino acids (e.g., a peptide or protein). In some embodiments, the linker is an organic molecule, group, polymer (e.g. a non-natural polymer, non-peptidic polymer), or chemical moiety. In some embodiments, the linker is 2-100 amino acids in length, for example, 2, 3, 4, 5, 6, 7, 8, 9, 10, 11, 12, 13, 14, 15, 16, 17, 18, 19, 20, 21, 22, 23, 24, 25, 26, 27, 28, 29, 30, 30-35, 35-40, 40-45, 45-50, 50-60, 60-70, 70-80, 80-90, 90-100, 100-150, or 150-200 amino acids in length. Longer or shorter linkers are also contemplated.

[0071] The term “mutation,” as used herein, refers to a substitution of a residue within a sequence, e.g., a nucleic acid or amino acid sequence, with another residue, or a deletion or insertion of one or more residues within a sequence. Mutations are typically described herein by identifying the original residue followed by the position of the residue within the sequence and by the identity of the newly substituted residue. Various methods for making the amino acid substitutions (mutations) provided herein are well known in the art, and are provided by, for example, Green and Sambrook, Molecular Cloning: A Laboratory Manual (4^{th} ed., Cold Spring Harbor Laboratory Press, Cold Spring Harbor, N.Y. (2012)).

[0072] The terms “nucleic acid,” and “polynucleotide,” as used herein, refer to a compound comprising a nucleobase and an acidic moiety, e.g., a nucleoside, a nucleotide, or a polymer of nucleotides. Typically, polymeric nucleic acids, e.g., nucleic acid molecules comprising three or more nucleotides are linear molecules, in which adjacent nucleotides are linked to each other via a phosphodiester linkage. In some embodiments, “nucleic acid” refers to individual nucleic acid residues (e.g. nucleotides and/or nucleosides). In some embodiments, “nucleic acid” refers to an oligonucleotide chain comprising three or more individual nucleotide residues. As used herein, the terms “oligonucleotide” and “polynucleotide” can be used interchangeably to refer to a polymer of nucleotides (e.g., a string of at least three nucleotides). In some embodiments, “nucleic acid” encompasses RNA as well as single and/or double-stranded DNA. Nucleic acids may be naturally occurring, for example, in the context of a genome, a transcript, an mRNA, tRNA, rRNA, siRNA, snRNA, a plasmid, cosmid, chromosome, chromatid, or other naturally occurring nucleic acid molecule. On the other hand, a nucleic acid molecule may be a non-naturally occurring molecule, e.g., a recombinant DNA or RNA, an artificial chromosome, an engineered genome, or fragment thereof, or a synthetic DNA, RNA, DNA/RNA hybrid, or including non-naturally occurring nucleotides or nucleosides. Furthermore, the terms “nucleic acid,” “DNA,” “RNA,” and/or similar terms include nucleic acid analogs, e.g., analogs having other than a phosphodiester backbone. Nucleic acids can be purified from natural sources, produced using recombinant expression systems and optionally purified, chemically synthesized, etc. Where appropriate, e.g., in the case of chemically synthesized molecules, nucleic acids can comprise nucleoside analogs such as analogs having chemically modified bases or sugars, and backbone modifications. A nucleic acid sequence is presented in the 5′ to 3′ direction unless otherwise indicated. In some embodiments, a nucleic acid is or comprises natural nucleosides (e.g. adenosine, thymidine, guanosine, cytidine, uridine, deoxyadenosine, deoxythymidine, deoxyguanosine, and deoxycytidine); nucleoside analogs (e.g., 2-aminoadenosine, 2-thiothymidine, inosine, pyrrolo-pyrimidine, 3-methyl adenosine, 5-methylcytidine, 2-aminoadenosine, C5-bromouridine, C5-fluorouridine, C5-iodouridine, C5-propynyl-uridine, C5-propynyl-cytidine, C5-methylcytidine, 2-aminoadenosine, 7-deazaadenosine, 7-deazaguanosine, 8-oxoadenosine, 8-oxoguanosine, O(6)-methylguanine, and 2-thiocytidine); chemically modified bases; biologically modified bases (e.g., methylated bases); intercalated bases; modified sugars (e.g., 2′-fluororibose, ribose, 2′-deoxyribose, arabinose, and hexose); and/or modified phosphate groups (e.g., phosphorothioates and 5′-N-phosphoramidite linkages).

[0073] The terms “protein,” “peptide,” and “polypeptide” are used interchangeably herein, and refer to a polymer of amino acid residues linked together by peptide (amide) bonds. The terms refer to a protein, peptide, or polypeptide of any size, structure, or function. Typically, a protein, peptide, or polypeptide will be at least three amino acids long. A protein, peptide, or polypeptide may refer to an individual protein or a collection of proteins. One or more of the amino acids in a protein, peptide, or polypeptide may be modified, for example, by the addition of a chemical entity such as a carbohydrate group, a hydroxyl group, a phosphate group, a farnesyl group, an isofarnesyl group, a fatty acid group, a linker for conjugation, functionalization, or other modification, etc. A protein, peptide, or polypeptide may also be a single molecule or may be a multi-molecular complex. A protein, peptide, or polypeptide may be just a fragment of a naturally occurring protein or peptide. A protein, peptide, or polypeptide may be naturally occurring, recombinant, or synthetic, or any combination thereof. The term “fusion protein” as used herein refers to a hybrid polypeptide which comprises protein domains from at least two different proteins. One protein may be located at the amino-terminal (N-terminal) portion of the fusion protein or at the carboxy-terminal (C-terminal) protein thus forming an “amino-terminal fusion protein” or a “carboxy-terminal fusion protein,” respectively. A protein may comprise different domains, for example, a nucleic acid binding domain (e.g., the gRNA binding domain of Cas9 that directs the binding of the protein to a target site) and a nucleic acid cleavage domain or a catalytic domain of a nucleic-acid editing protein. In some embodiments, a protein is in a complex with, or is in association with, a nucleic acid, e.g., RNA. Any of the proteins provided herein may be produced by any method known in the art. For example, the proteins provided herein may be produced via recombinant protein expression and purification, which is especially suited for fusion proteins comprising a peptide linker. Methods for recombinant protein expression and purification are well known, and include those described by Green and Sambrook, Molecular Cloning: A Laboratory Manual (4^{th} ed., Cold Spring Harbor Laboratory Press, Cold Spring Harbor, N.Y. (2012)), which are incorporated herein by reference.

[0074] The term “subject,” as used herein, refers to an individual organism, for example, an individual mammal. A “subject in need thereof”, refers to an individual who has a disease, a symptom of the disease, or a predisposition toward the disease, with the purpose to cure, heal, alleviate, relieve, alter, remedy, ameliorate, improve, or affect the disease, the symptom of the disease, or the predisposition toward the disease. In some embodiments, the subject is a mammal. In some embodiments, the subject is a non-human primate. In some embodiments, the subject is human. In some embodiments, the mammal is a rodent. In some embodiments, the rodent is a mouse. In some embodiments, the rodent is a rat. In some embodiments, the mammal is a companion animal. A “companion animal” refers to pets and other domestic animals. Non-limiting examples of companion animals include dogs and cats; livestock such as horses, cattle, pigs, sheep, goats, and chickens; and other animals such as mice, rats, guinea pigs, and hamsters.

[0075] The term “recombinant” as used herein in the context of proteins or nucleic acids refers to proteins or nucleic acids that do not occur in nature, but are the product of human engineering. For example, in some embodiments, a recombinant protein or nucleic acid molecule comprises an amino acid or nucleotide sequence that comprises at least one, at least two, at least three, at least four, at least five, at least six, or at least seven mutations as compared to any naturally occurring sequence. The fusion proteins (e.g., base editors) useful in the present disclosure are made recombinantly. Recombinant technology is familiar to those skilled in the art.

[0076] An “intron” refers to any nucleotide sequence within a gene that is removed by RNA splicing during maturation of the final RNA product. The term intron refers to both the DNA sequence within a gene and the corresponding sequence in RNA transcripts. Sequences that are joined together in the final mature RNA after RNA splicing are exons. Introns are found in the genes of most organisms and many viruses, and can be located in a wide range of genes, including those that generate proteins, ribosomal RNA (rRNA), and transfer RNA (tRNA). When proteins are generated from intron-containing genes, RNA splicing takes place as part of the RNA processing pathway that follows transcription and precedes translation.

[0077] An “exon” refers to any part of a gene that will become a part of the final mature RNA produced by that gene after introns have been removed by RNA splicing. The term exon refers to both the DNA sequence within a gene and to the corresponding sequence in RNA transcripts. In RNA splicing, introns are removed and exons are covalently joined to one another as part of generating the mature messenger RNA.

[0078] “Splicing” refers to the processing of a newly synthesized messenger RNA transcript (also referred to as a primary mRNA transcript). After splicing, introns are removed and exons are joined together (ligated) for form mature mRNA molecule containing a complete open reading frame that is decoded and translated into a protein. For nuclear-encoded genes, splicing takes place within the nucleus either co-transcriptionally or immediately after transcription. The molecular mechanism of RNA splicing has been extensively described, e.g., in Pagani et al., Nature Reviews Genetics 5, 389-396, 2004; Clancy et al., Nature Education 1 (1): 31, 2011; Cheng et al., Molecular Genetics and Genomics 286 (5-6): 395-410, 2014; Taggart et al., Nature Structural & Molecular Biology 19 (7): 719-2, 2012, the contents of each of which are incorporated herein by reference. One skilled in the art is familiar with the mechanism of RNA splicing.

[0079] “Alternative splicing” refers to a regulated process during gene expression that results in a single gene coding for multiple proteins. In this process, particular exons of a gene may be included within or excluded from the final, processed messenger RNA (mRNA) produced from that gene. Consequently, the proteins translated from alternatively spliced mRNAs will contain differences in their amino acid sequence and, often, in their biological functions. Notably, alternative splicing allows the human genome to direct the synthesis of many more proteins than would be expected from its 20,000 protein-coding genes. Alternative splicing is sometimes also termed differential splicing. Alternative splicing occurs as a normal phenomenon in eukaryotes, where it greatly increases the biodiversity of proteins that can be encoded by the genome; in humans, ˜95% of multi-exonic genes are alternatively spliced. There are numerous modes of alternative splicing observed, of which the most common is exon skipping. In this mode, a particular exon may be included in mRNAs under some conditions or in particular tissues, and omitted from the mRNA in others. Abnormal variations in splicing are also implicated in disease; a large proportion of human genetic disorders result from splicing variants. Abnormal splicing variants are also thought to contribute to the development of cancer, and splicing factor genes are frequently mutated in different types of cancer. The regulation of alternative splicing is also described in the art, e.g., in Douglas et al., Annual Review of Biochemistry 72 (1): 291-336, 2003; Pan et al., Nature Genetics 40 (12): 1413-1415, 2008; Martin et al., Nature Reviews 6 (5): 386-398, 2005; Skotheim et al., The international journal of biochemistry & cell biology 39 (7-8): 1432-49, 2007, each of which is incorporated herein by reference.

[0080] A “coding frame” or “open reading frame” refers to a stretch of codons that encodes a polypeptide. Since DNA is interpreted in groups of three nucleotides (codons), a DNA strand has three distinct reading frames. The double helix of a DNA molecule has two anti-parallel strands so, with the two strands having three reading frames each, there are six possible frame translations. A functional protein may be produced when translation proceeds in the correct coding frame. An insertion or a deletion of one or two bases in the open reading frame causes a shift in the coding frame that is also referred to as a “frameshift mutation.” A frameshift mutation typical results in premature translation termination and/or truncated or non-functional protein.

[0081] A “neurotropic virus” is a virus that is capable of accessing or entering the nervous system and neurovirulent if it is capable of causing disease within the nervous system (e.g., CNS or PNS). Important neuroinvasive viruses include poliovirus, which is highly neurovirulent but weakly neuroinvasive, and rabies virus, which is highly neurovirulent but requires tissue trauma (often resulting from an animal bite) to become neuroinvasive. Neurotropic viral delivery vectors may be derived from neurotropic virus to facilitate the delivery of agents (e.g., therapeutic agents for neurological diseases) to neurons. Non-limiting, exemplary neurotropic viruses that may be used to develop neurotropic viral delivery vectors include: Japanese encephalitis virus, Venezuelan equine encephalitis virus, California encephalitis viruses; polio virus, coxsackie virus, echo virus, mumps virus, measles virus, influenza virus, rabies virus, herpes simplex virus, varicella-zoster virus, Epstein-Barr virus, cytomegalo virus, and HHV-6 virus. Methods of using neurotropic viral delivery vectors to delivery therapeutic agents to neurons have been described in the art, e.g., in Lim et al., Pharmacol Res. 2010 January; 61(1): 14-26; Berges et al., Molecular Therapy, Volume 15, Issue 1, January 2007, Pages 20-29; and Beverly et al., Nature Reviews Neuroscience 4, 353-364, 2003, each of which in incorporated herein by reference.

[0082] Other viruses that are known to be suitable for gene transfer may also be used to deliver agents to neurons, e.g., adeno-associated virus (AAV), lentivirus, and retrovirus. An AAV-based neurotropic viral delivery system has recently been described in Deverman et al., Nature Biotechnology 34, 204-209 (2016), incorporated herein by reference. Delivery of a split Cas9 using AAV has also been described, e.g., in Truong et al., Nucl. Acids Res. 43, 6450 (2016), and U.S. Provisional Application 62/408,575, filed Oct. 14, 2016, each of which is incorporated herein by reference.

[0083] These and other exemplary substituents are described in more detail in the Detailed Description, Examples, and Claims. The invention is not intended to be limited in any manner by the above exemplary listing of substituents.

### DETAILED DESCRIPTION OF CERTAIN EMBODIMENTS

[0084] A normal physiological outcome of trauma, inflammation, and/or nerve injury is the induction of gene expression changes in neighboring nociceptive neurons during the period required for healing. Such changes in gene expression, for example, may facilitate the firing of action potentials by neurons at a lower activation threshold and in turn underlie the sensations of pain (e.g., hyperalgesia (increased pain sensitivity) and allodynia (pain following a normally innocuous stimulus)). Chronic pain develops when the enhanced sensitization of sensory neurons becomes irreversibly established and becomes a persistent maladaptive condition. The functional specialization of sensory neurons is driven by the expression of dedicated ion channel genes (e.g., the ion channel genes listed in Table 12) that fine-tune the membrane polarization to trigger and propagate action potentials in response to stimuli. Accordingly, the etiology of chronic pain can be attributed to, at least in part, the dysregulated expression of one or more genes in one or more neurons.

[0085] In general, the types of chronic pain that occur in most parts of the body and the extremities involve afferent neurons of the dorsal root ganglia (DRG), which reside in clusters of nerve cells near the spinal cord and have long axons extending towards, for example, the skin, muscles, and organs (FIG. 1). The mechanism of enhanced excitability involves voltage-gated ion channels and background/leak channels that set the resting membrane potential and firing threshold of DRG neurons. Under normal conditions, chemical, mechanical, or thermal stimuli are required to activate receptors and ion channels in peripheral nerve endings to initiate action potentials that propagate along the axons of DRG neurons. In some instances, the dendritic termini of the DRG neurons liberate glutamate and substance-P at synapses in the spinal cord dorsal horn, activating second-order neurons that communicate pain signals to the brain.

[0086] Human DRG neurons constitutively express specific and specialized ion channels that have been implicated in afferent pain signaling, which may be targeted for modulation of chronic pain conditions. Three sodium channels (NaV1.7, NaV1.8, and NaV1.9) are constitutively expressed in DRG neurons, and a fourth gene (NaV1.3) displays elevated expression after nerve injury (Table 12). In some embodiments, targeting the ion channels using the strategies described herein leads to gene ablation, loss-of-function, destabilization of the transcript and/or protein folding of the targeted ion channels, which in turn leads to reduced pain transmission. In some embodiments, the normal function of the DRG neurons in triggering action potentials and reaching a normal membrane depolarization threshold is not comprised post editing.

[0087] Thus, in some embodiments, a polynucleotide encoding any one of NaV1.7, NaV1.8, NaV1.9, NaV1.3, CaV3.2, HCN1, HCN2, or Ano1 ion-channels is targeted by a genome editing agent (e.g., a nucleobase editor, nuclease). In some embodiments, a polynucleotide (e.g., DNA) encoding NaV1.7 ion channel is targeted.

[0088] In a human genome, the NaV1.7 ion channel is encoded by the SCN9A gene. Thus, in some embodiments, the nucleobase editor targets the SCN9A gene in a genome, e.g., a human genome. Disruption of SCN9A is only desirable at a localized level, because nociception is essentially a protective mechanism from overextension and deformation of our joints and muscles, and it is also necessary for our sense of smell. Humans presenting homozygous SCN9A loss-of-function mutations may suffer from congenital insensitivity to pain (CIP). Conversely, gain-of-function mutations in the sodium channels NaV1.7 (SCN9A) or NaV1.8 (SCN10A) cause congenital pain syndromes, such as primary erythermalgia. In some embodiments, the SCN9A gene is involved in itching.

[0089] Various genome-editing agents useful in the present disclosure may be deployed to the DRG neurons (e.g., dysregulated DRG neurons to modify the genes responsible for propagation of pain signals in DRG neurons. The strategies for pain (e.g., chronic pain) suppression described herein are superior to traditional methods of pain management due to their high specificity, efficacy, and safety profile. In some embodiments, one or more design elements may be utilized in the strategies described herein that achieves precise and selective targeting of pain-causative neurons. Such design elements include, for example: 1) localized delivery of a non-replicative viral vector that requires synaptic terminals, sparing the bulk of somatic tissues near the pain site, 2) neuron-specific promoters that drive expression of the genome editing construct; and/or 3) guide-RNA programmed targeting of non-essential ion channel genes exclusively expressed by DRG neurons to spare other types of neurons (efferent neurons, interneurons, etc.).

[0090] Some aspects of the present disclosure relate to editing a polynucleotide encoding an ion channel in a DRG neuron, the method comprising contacting the ion channel-encoding polynucleotide with a nucleobase editor described herein and a guide nucleotide sequence targeting the nucleobase editor to a target site in the ion channel-encoding polynucleotide. The nucleobase editors described herein target C bases. Contacting the nucleobase editor with a target C base (e.g., a target C base in a ion channel-encoding polynucleotide) results in a cytosine (C) to thymine (T) change in the ion channel-encoding polynucleotide. Such C to T base change ultimately leads to a C:G to T:A base pair change.

### Strategies for Targeting Ion Channels in DRG Neurons

[0091] The targeted editing of polynucleotides encoding ion channels in neurons (e.g., DRG neurons) may be achieved, in some embodiments, using nucleobase editors as described in, e.g., U.S. Pat. No. 9,068,179, issued Jun. 30, 2015; US Patent Application Publications US 2015/0166980, US 2015/0166981, US 2015/0166982, US 2015/0166984, and US 2015/0165054, and US Provisional applications, U.S. Ser. No. 62/245,828, filed Oct. 23, 2015; 62/279,346, filed Jan. 15, 2016; 62/311,763, filed Mar. 22, 2016; 62/322,178, filed Apr. 13, 2016, 62/357,352, filed Jun. 30, 2016, 62/370,700, filed Aug. 3, 2016; 62/398,490, filed Sep. 22, 2016; and 62/408,686, filed Oct. 14, 2016; PCT Application PCT/US2016/058344, filed Oct. 22, 2016; US patent application U.S. Ser. No. 15/311,852, filed Oct. 22, 2016; and in Komor et al., Nature, Programmable editing of a target base in genomic DNA without double-stranded DNA cleavage, 533, 420-424 (2016), the entire contents of each of which are incorporated herein by reference.

[0092] The nucleobase editors can precisely edit a target base in an ion channel-encoding polynucleotide without introducing a DNA double stand break, thus reducing genome instability and preventing possible oncogenic modifications that may be caused by other genome editing methods. The nucleobase editors described herein may be programmed to target and modify a single base. In some embodiments, the target base is a cytosine (C) base and may be converted to a thymine (T) base via deamination by the nucleobase editor.

[0093] In some embodiments, the ion channel-encoding polynucleotide is a DNA molecule comprising a coding strand and a complementary strand, e.g., a gene locus for the ion channel in a genome. The target base may be on either the coding-strand or the complementary strand of an ion channel-encoding polynucleotide. In some embodiments, the ion channel-encoding polynucleotide includes coding regions (e.g., exons) and non-coding regions (e.g., introns or splicing sites). In some embodiments, the target base (e.g., a C base) is located in the coding region (e.g., an exon) of the ion channel-encoding polynucleotide (e.g., the ion channel gene locus). In some embodiments, the conversion of a base in the coding region results in an amino acid change in the ion channel protein sequence, i.e., a mutation. In some embodiments, editing the ion channel-encoding polynucleotide results in a loss-of-function mutant (e.g., for SCN9A). In some embodiments, editing the ion channel-encoding polynucleotide results in a gain-of-function mutant (e.g., for SCN11A).

[0094] In some embodiments, the target base is located in a non-coding region of the ion channel-encoding polynucleotide, e.g., in an intron or a splicing site. In some embodiments, a target base is located in a splicing site and the editing of such target base causes alternative splicing of the ion channel mRNA. In some embodiments, the alternative splicing leads to loss-of-function ion-channel mutants. In some embodiments, the alternative splicing leads to the introduction of a premature stop codon in an ion channel mRNA, resulting in truncated and/or unstable ion channel proteins. In some embodiments, ion channel mutants that are defective in folding are produced.

[0095] In some embodiments, the activity of a loss-of-function ion channel variant may be reduced by at least 20%, at least 30%, at least 40%, at least 50%, at least 60%, at least 70%, at least 80%, at least 90%, at least 99%, or more. In some embodiments, the loss-of-function ion channel variant has no more than 50%, no more than 40%, no more than 30%, no more than 20%, no more than 10%, no more than 5%, no more than 1%, or less activity compared to a wild type ion channel protein.

[0096] In some embodiments, the activity of a gain-of-function ion channel variant may be elevated by at least 20%, at least 30%, at least 40%, at least 50%, at least 60%, at least 70%, at least 80%, at least 90%, at least 99%, or more. In some embodiments, the loss-of-function ion channel variant has no more than 50%, no more than 40%, no more than 30%, no more than 20%, no more than 10%, no more than 5%, no more than 1%, or less activity compared to a wild type ion channel protein.

[0097] To edit the ion channel-encoding polynucleotide gene, the ion channel-encoding nucleotide may contacted with a genome-editing agent (e.g., a programmable nuclease or a nucleobase editor), wherein the genome-editing agent binds to its target sequence and edits the target site. For example, the genome-editing agent (e.g., a nucleobase editor) may be expressed in a cell where editing is desired (e.g., a DRG neuron), to thereby allow contacting of the ion channel gene with the agent. In some embodiments, the binding of the genome editing agent (e.g., a nucleobase editor) to its target sequence in the ion channel-encoding polynucleotide is mediated by a guide nucleotide sequence, e.g., a guide RNA (gRNA). The guide nucleotide sequence is designed to be complementary to one of the strands of the target sequence in the ion channel-encoding polynucleotide. The guide nucleotide sequence may be engineered to guide the nucleobase editor to any target base (e.g., target bases listed in Table 2) in an ion channel gene (e.g., SCN9A), provided that a PAM is located 3′ of the target base. In some embodiments, the guide nucleotide sequence is co-expressed with the programmable nuclease or nucleobase editor in a cell where editing is desired (e.g., a DRG neuron). In some embodiments, a programmable nuclease or a nucleobase editor in complex with a gRNA is delivered to a cell where editing is desired (e.g., a DRG neuron). Strategies of editing the ion channel genes using nucleobase editors are provided.

### Codon Change

[0098] Using the nucleobase editors, an amino acid codon may be converted to a different codon via deamination of a target base within the codon. For example, in some embodiments, a cytosine (C) base is converted to a thymine (T) base via deamination by a nucleobase editor comprising a cytosine deaminase domain (e.g., APOBEC1 or AID). It is worth noting that during a C to T change via deamination (e.g., by a cytosine deaminase such as APOBEC1 or AID), the cytosine is first converted to a uridine (U), leading to a G:U mismatch. The G:U mismatch is then converted by DNA repair machinery and replication pathways to T:A pair, thus introducing the thymine at the position of the original cytosine. In some embodiments, conversion of a base in an amino acid codon may lead to a change of the amino acid the codon encodes. Cytosine deaminases are capable of converting a cytosine (C) base to a thymine (T) base via deamination. Thus, it is envisioned that, for amino acid codons containing a C base, the C base may be directly converted to T. For example, codon (CTC) for leucine may be changed to a TTC (phenylalanine) codon via the deamination of the first C on the coding strand. For amino acid codons that contain a guanine (G) base, a C base is present on the complementary strand; and the G base may be converted to an adenosine (A) via the deamination of the C on the complementary strand. For example, an ATG (Met/M) codon may be converted to a ATA (Ile/I) codon via the deamination of the third C on the complementary strand. In some embodiments, two C to T changes are required to convert a codon to a different codon. Non-limiting examples of possible mutations that may be made (e.g., in the ion channel-encoding polynucleotide) by the nucleobase editors of the present disclosure are summarized in Table 1.

TABLE 1
Exemplary Codon Changes via Base Editing

| Target codon | Base-editing reaction (s) | Edited codon |
|---|---|---|
| CTT (Leu/L) | 1st base C to T on coding strand | TTT (Phe/F) |
| CTC (Leu/L) | 1st base C to T on coding strand | TTC (Phe/F) |
| ATG (Met/M) | 3rd base C to T on complementary strand | ATA (Ile/I) |
| GTT (Val/V) | 1st base C to T on complementary stand | ATT (Ile/I) |
| GTA (Val/V) | 1st base C to T on complementary stand | ATA (Ile/I) |
| GTC (Val/V) | 1st base C to T on complementary strand | ATC (Ile/I) |
| GTG (Val/V) | 1st base C to T on complementary strand | ATG (Met/M) |
| TCT (Ser/S) | 2nd base C to T on coding strand | TTT (Phe/F) |
| TCC (Ser/S) | 2nd base C to T on coding strand | TTC (Phe/F) |
| TCA (Ser/S) | 2nd base C to T on coding strand | TTA (Leu/L) |
| TCG (Ser/S) | 2nd base C to T on coding strand | TTG (Leu/L) |
| AGT (Ser/S) | 2nd base C to T on complementary strand | AAT (Asp/N) |
| AGC (Ser/S) | 2nd base C to T on complementary strand | AAC (Aps/N) |
| CCT (Pro/P) | 1st base C to T on coding strand | TCT (Ser/S) |
| CCC (Pro/P) | 1st base C to T on coding strand | TCC (Ser/S) |
| CCA (Pro/P) | 1st base C to T on coding strand | TCA (Ser/S) |
| CCG (Pro/P) | 1st base C to T on coding strand | TCG (Ser/S) |
| CCT (Pro/P) | 2nd base C to T on coding strand | CTT (Leu/L) |
| CCC (Pro/P) | 2nd base C to T on coding strand | CTC (Leu/L) |
| CCA (Pro/P) | 2nd base C to T on coding strand | CTA (Leu/L) |
| CCG (Pro/P) | 2nd base C to T on coding strand | CTG (Leu/L) |
| ACT (Thr/T) | 2nd base C to T on coding strand | ATT (Leu/L) |
| ACC (Thr/T) | 2nd base C to T on coding strand | ATC (Leu/L) |
| ACA (Thr/T) | 2nd base C to T on coding strand | ATA (Leu/L) |
| ACG (Thr/T) | 2nd base C to T on coding strand | ATG (Met/M) |
| GCT (Ala/A) | 2nd base C to T on coding strand | GTT (Val/V) |
| GCC (Ala/A) | 2nd base C to T on coding strand | GTC (Val/V) |
| GCA (Ala/A) | 2nd base C to T on coding strand | GTA (Val/V) |
| GCG (Ala/A) | 2nd base C to T on coding strand | GTG (Val/V) |
| GCT (Ala/A) | 1st base C to T on complementary stand | ACT (Thr/T) |
| GCC (Ala/A) | 1st base C to T on complementary stand | ACC (Thr/T) |
| GCA (Ala/A) | 1st base C to T on complementary stand | ACA (Thr/T) |
| GCG (Ala/A) | 1st base C to T on complementary stand | ACG (Thr/T) |
| CAT (His/H) | 1st base C to T on complementary stand | TAT (Tyr/Y) |
| CAC (His/H) | 1st base C to T on complementary stand | TAC (Tyr/Y) |
| GAT (Asp/D) | 1st base C to T on complementary stand | AAT (Asp/N) |
| GAC (Asp/D) | 1st base C to T on complementary stand | AAC (Asp/N) |
| GAA (Glu/E) | 1st base C to T on complementary stand | AAA (Lys/K) |
| GAG (Glu/E) | 1st base C to T on complementary stand | AAG (Lys/K) |
| TGT (Cys/C) | 2nd base C to T on complementary stand | TAT (Tyr/Y) |
| TGC (Cys/C) | 2nd base C to T on complementary stand | TAC (Tyr/Y) |
| CGT (Arg/R) | 1st base C to T on coding strand | TGT (Cys/C) |
| CGC (Arg/R) | 1st base C to T on coding strand | TGC (Cys/C) |
| AGA (Arg/R) | 2nd base C to T on complementary stand | AAA (Lys/K) |
| AGG (Arg/R) | 2nd base C to T on complementary stand | AAG (Lys/K) |
| CGG (Arg/R) | 2nd base C to T on complementary stand | CAG (Gln/Q) |
| CGG (Arg/R) | 1st base C to T on coding strand | TGG (Trp/W) |
| GGT (Gly/G) | 2nd base C to T on complementary stand | GAT (Asp/D) |
| GGC (Gly/G) | 2nd base C to T on complementary stand | GAC (Asp/D) |
| GGA (Gly/G) | 2nd base C to T on complementary stand | GAA (Glu/E) |
| GGG (Gly/G) | 2nd base C to T on complementary stand | GAG (Glu/E) |
| GGT (Gly/G) | 1st base C to T on complementary stand | AGT (Ser/S) |
| GGC (Gly/G) | 1st base C to T on complementary stand | AGC (Ser/S) |
| GGA (Gly/G) | 1st base C to T on complementary stand | AGA (Arg/R) |
| GGG (Gly/G) | 1st base C to T on complementary stand | AGG (Arg/R) |

[0099] In some embodiments, nucleobase editor is guided by a guide nucleotide sequence to its target sequence that it binds. In some embodiments, the guide nucleotide sequence is a gRNA sequence. An gRNA typically comprises a tracrRNA framework allowing for Cas9 binding, and a guide sequence, which confers sequence specificity to fusion proteins disclosed herein. In some embodiments, the guide RNA comprises a structure 5′-[guide sequence]-guuuuagagcuagaaauagcaaguuaaaauaaaggcuaguccguuaucaacuugaaaaaguggcaccgagucggugcuu uuu-3′ (SEQ ID NO: 338), wherein the guide sequence comprises a sequence that is complementary to the target sequence. The guide sequence is typically about 20 nucleotides long. For example, the guide sequence may be 15-25 nucleotides long. In some embodiments, the guide sequence is 15, 16, 17, 18, 19, 20, 21, 22, 23, 24, or 25 nucleotides long. Such suitable guide RNA sequences typically comprise guide sequences that are complementary to a nucleic sequence within 50 (e.g., 50, 45, 40, 35, 30, 25, 20, 15, or 10) nucleotides upstream or downstream of the target nucleotide to be edited.

[0100] In some embodiments, at least 1 mutation is introduced into the ion channel-encoding polynucleotide. In some embodiments, at least 2, 3, 4, 5, 6, 7, 8, 9, 10 or more mutations are introduced into the ion channel-encoding polynucleotide.

[0101] Target sites for nucleobase editors in the SCN9A gene encoding the ion channel NaV1.7 are provided in Table 2. The mutations presented herein are for illustration purpose only and are not meant to be limiting.

TABLE 2
Exemplary NaV1.7 (SNA9A) Protective Loss-of-Function Mutations
via Codon Changes

| | | | Program- | | | | |
|---|---|---|---|---|---|---|---|
| | | | mable | SEQ | | | |
| Residue | Codon | Resulting | guide-RNA | ID | | gRNA size | BE |
| Change | Change | Codon(s) | sequence | NOs | (PAM) | (C edited) | type^{a} |
| P5L/S/F | CCT | YYT | GAUGGCAAUG | 339 | (CAG) | 20 (C14/15) | SpBE3 |
| | | | UUGCCUCCCC | | | | |
| P5L/S/F | CCN | YYN | AUGGCAAUGU | 340 | (AGG) | 20 (C13/14) | SpBE3 |
| | | | UGCCUCCCCC | | | | |
| P5/6L/S/F | CCN | YYN | UGGCAAUGUU | 341 | (GGAC) | 20 (C12/13) | VQR- |
| | | | GCCUCCCCCA | | | | SpBE3 |
| P5/6L/S/F | CCN | YYN | UGUUGCCUCC | 342 | (CAG) | 20 (C6/7) | SpBE3 |
| | | | CCCAGGACCU | | | | |
| P5/6/7L/S/F | CCN | YYN | GUUGCCUCCC | 343 | (AGAG) | 20 (C5/6) | EQR- |
| | | | CCAGGACCUC | | | | SpBE3 |
| P5/6/7L7S/F | CCN | YYN | UUGCCUCCCC | 344 | (GAG) | 20 (C4/5) | SpBE3 |
| | | | CAGGACCUCA | | | | |
| P35L/S/F | CCC | YYC | AAAAUCAAAG | 345 | (AAG) | 20 (C14/15) | SpBE3 |
| | | | GAACCCAAAG | | | | |
| P35L/S/F | CCC | YYC | AAAUCAAAGG | 346 | (AGAA) | 20 (C13/14) | VQR- |
| | | | AACCCAAAGA | | | | SpBE3 |
| P35L/S/F | CCC | YYC | CAAAGGAACC | 347 | (AAG) | 20 (C9/10) | SpBE3 |
| | | | CAAAGAAGAA | | | | |
| P35LVS/F | CCC | YYC | AAAGGAACCC | 348 | (AGAA) | 20 (C8/9) | VQR- |
| | | | AAAGAAGAAA | | | | SpBE3 |
| P35L/S/F | CCC | YYC | GGAACCCAAA | 349 | (AAG) | 20 (C5/6) | SpBE3 |
| | | | GAAGAAAAGA | | | | |
| P35L/S/F | CCC | YYC | GAACCCAAAG | 350 | (AGAT) | 20 (C4/5) | VQR- |
| | | | AAGAAAAGAA | | | | SpBE3 |
| P35L7S/F | CCC | YYC | CCCAAAGAAG | 351 | (TGAT) | 20 (C1/2) | VQR- |
| | | | AAAAGAAAGA | | | | SpBE3 |
| P35L/S/F | CCC | YYC | AGGAACCCAA | 352 | (AAAGAT) | 20 (C6/7) | KKH- |
| | | | AGAAGAAAAG | | | | SaBE3 |
| P35L/S/F | CCC | YYC | AACCCAAAGA | 353 | (GATGAT) | 20 (C3/4) | KKH- |
| | | | AGAAAAGAAA | | | | SaBE3 |
| P35LVS/F | CCC | YYC | GAAAAUCAAA | 354 | (GAAGAAA) | 20 (C15/16) | St1BE3 |
| | | | GGAACCCAAA | | | | |
| P35LVS/F | CCC | YYC | UCAAAGGAAC | 355 | (AAAGAAA) | 20 (C10/11) | St1BE3 |
| | | | CCAAAGAAGA | | | | |
| P47L/S/F | CCA | YYA | GAUGAAGAAG | 356 | (AAG) | 20 (C13/14) | SpBE3 |
| | | | CCCCAAAGCC | | | | |
| P47L/S/F | CCA | YYA | GAAGAAGCCC | 357 | (CAG) | 20 (C10/11) | SpBE3 |
| | | | CAAAGCCAAG | | | | |
| P47L/S/F | CCA | YYA | AAGAAGCCCC | 358 | (AGTG) | 20 (C9/10) | VQR- |
| | | | AAAGCCAAGC | | | | SpBE3 |
| P47L/S/F | CCA | YYA | GAAGCCCCAA | 359 | (TGAC) | 20 (C7/8) | VQR- |
| | | | AGCCAAGCAG | | | | SpBE3 |
| P47/49L7S/F | CCA | YYA | CCCAAAGCCA | 360 | (TGG) | 20 (C2/3/ | SpBE3 |
| | | | AGCAGUGACU | | | 8/9) | |
| P47/49L/S/F | CCA | YYA | CCAAAGCCAA | 361 | (GGAA) | 20 (C1/2/ | VQR- |
| | | | GCAGUGACUU | | | 7/8) | SpBE3 |
| P47L/S/F | CCA | YYA | AUGAAGAAGC | 362 | (AGCAGT) | 20 (C12/13) | KKH- |
| | | | CCCAAAGCCA | | | | SaBE3 |
| P49LVS/F | CCA | YYA | AAAGCCAAGC | 363 | (AAG) | 20 (C5/6) | SpBE3 |
| | | | AGUGACUUGG | | | | |
| P49L/S/F | CCA | YYA | CCAAGCAGUG | 364 | (TGG) | 20 (C1/2) | SpBE3 |
| | | | ACUUGGAAGC | | | | |
| P60L/S/F | CCC | YYC | AAACAGCUGC | 365 | (TGG) | 20 (C10/11) | SpBE3 |
| | | | CCUUCAUCUA | | | | |
| P60LVS/F | CCC | YYC | AACAGCUGCC | 366 | (GGG) | 20 (C9/10) | SpBE3 |
| | | | CUUCAUCUAU | | | | |
| P60LVS/F | CCC | YYC | ACAGCUGCCC | 367 | (GGG) | 20 (C8/9) | SpBE3 |
| | | | UUCAUCUAUG | | | | |
| P60L/S/F | CCC | YYC | CAGCUGCCCU | 368 | (GGAC) | 20 (C7/8) | VQR- |
| | | | UCAUCUAUGG | | | | SpBE3 |
| P60L7S/F | CCC | YYC | AAACAGCUGC | 369 | (TGGGG) | 20 (C10/11) | St3BE3 |
| | | | CCUUCAUCUA | | | | |
| P67/8L/S/F | CCT | YYT | UGGGGACAUU | 370 | (TGG) | 20 (Cl 1 -15) | SpBE3 |
| | | | CCUCCCGGCA | | | | |
| P67/8L7S/F | CCT | YYT | GGGGACAUUC | 371 | (GGTG) | 20 (C10-14) | VQR- |
| | | | CUCCCGGCAU | | | | SpBE3 |
| P67/8L/S/F | CCT | YYT | CAUUCCUCCC | 372 | (CAG) | 20 (C5-9) | SpBE3 |
| | | | GGCAUGGUGU | | | | |
| P67/8L/S/F | CCT | YYT | AUUCCUCCCG | 373 | (AGAG) | 20 (C4-8) | EQR* |
| | | | GCAUGGUGUC | | | | SpBE3 |
| P67/8L7S/F | CCT | YYT | UUCCUCCCGG | 374 | (GAG) | 20 (C3-7) | SpBE3 |
| | | | CAUGGUGUCA | | | | |
| P67L/S/F | CCT | YYT | UAUGGGGACA | 375 | (CATGGT) | 20 (C13-17) | KKH- |
| | | | UUCCUCCCGG | | | | SaBE3 |
| P67L/S/F | CCT | YYT | UGGGGACAUU | 376 | (TGGTG) | 20 (C11-15) | St3BE3 |
| | | | CCUCCCGGCA | | | | |
| P74L/S/F | CCC | YYC | CAUGGUGUCA | 377 | (AGG) | 20 (C14/15) | SpBE3 |
| | | | GAGCCCCUGG | | | | |
| P74LVS/F | CCC | YYC | AUGGUGUCAG | 378 | (GGAC) | 20 (C13/14) | VQR- |
| | | | AGCCCCUGGA | | | | SpBE3 |
| P74L/S/F | CCC | YYC | GUCAGAGCCC | 379 | (TGG) | 20 (C8/9) | SpBE3 |
| | | | CUGGAGGACU | | | | |
| P74L/S/F | CCC | YYC | UCAGAGCCCC | 380 | (GGAC) | 20 (C7/8) | VQR- |
| | | | UGGAGGACUU | | | | SpBE3 |
| P80L7S/F | CCC | YYC | GGACUUGGAC | 381 | (CAG) | 20 (C11/12) | SpBE3 |
| | | | CCCUACUAUG | | | | |
| P80L/S/F | CCC | YYC | GACUUGGACC | 382 | (AGAC) | 20 (C10/11) | VQR- |
| | | | CCUACUAUGC | | | | SpBE3 |
| P80LVS/F | CCC | YYC | ACCCCUACUA | 383 | (AAG) | 20 (C3/4) | SpBE3 |
| | | | UGCAGACAAA | | | | |
| P80L/S/F | CCC | YYC | CCCCUACUAU | 387 | (AGG) | 20 (C2/3) | SpBE3 |
| | | | GCAGACAAAA | | | | |
| P80LVS/F | CCC | YYC | CCCUACUAUG | 388 | (GGTG) | 20 (C1/2) | VQR- |
| | | | CAGACAAAAA | | | | SpBE3 |
| P80LVS/F | CCC | YYC | GACCCCUACU | 389 | (AAAGGT) | 20 (C4/5) | KKH- |
| | | | AUGCAGACAA | | | | SaBE3 |
| P80L/S/F | CCC | YYC | CCCCUACUAU | 390 | (AGGTG) | 20 (C2/3) | St3BE3 |
| | | | GCAGACAAAA | | | | |
| P111L7S/F | CCT | YYT | CUUUCUCCUU | 391 | (AAG) | 20 (C7/8) | SpBE3 |
| | | | UCAGUCCUCU | | | | |
| P111L/S/F | CCT | YYT | UUUCUCCUUU | 392 | (AGAA) | 20 (C6/7) | VQR- |
| | | | CAGUCCUCUA | | | | SpBE3 |
| P111L7S/F | CCT | YYT | UCUCCUUUCA | 393 | (AAG) | 20 (C4/5) | SpBE3 |
| | | | GUCCUCUAAG | | | | |
| P111/4L/S/F | CCT | YYT | CUCCUUUCAG | 394 | (AGAA) | 20 | VQR- |
| | | | UCCUCUAAGA | | | (C3/4/12) | SpBE3 |
| P111L/S/F | CCT | YYT | UCUCCUUUCA | 395 | (AAGAAT) | 20 (C4/5) | SaBE3 |
| | | | GUCCUCUAAG | | | | |
| P111L/S/F | CCT | YYT | GCUUUCUCCU | 396 | (TAAGAAG) | 20 (C8/9) | St1BE3 |
| | | | UUCAGUCCUC | | | | |
| P111L/S/F | CCT | YYT | UUCUCCUUUC | 397 | (GAAGAAT) | 20 (C5/6) | St1BE3 |
| | | | AGUCCUCUAA | | | | |
| P114L/S/F | CCT | YYT | CCUCUAAGAA | 398 | (TAAGAT) | 20 | KKH- |
| | | | GAAUAUCUAU | | | (C1/2/12) | SaBE3 |
| C134Y | TGC | TAC | AGUGCACAUG | 399 | (TGAA) | 20 (C5) | VQR- |
| | | | AUGAGCAUGC | | | | SpBE3 |
| C134Y | TGC | TAC | GUCAGAAUAG | 400 | (GAG) | 20 (C13) | SpBE3 |
| | | | UGCACAUGAU | | | | |
| C134Y | TGC | TAC | CACAUGAUGA | 401 | (TAAGGT) | 20 (C1) | KKH- |
| | | | GCAUGCUGAA | | | | SaBE3 |
| C134Y | TGC | TAC | UAGUGCACAU | 402 | (CTGAAT) | 20 (C6) | SaBE3 |
| | | | GAUGAGCAUG | | | | |
| C140Y | TGC | TAC | AAUAUGCAGU | 403 | (AGTG) | 20 (C7) | VQR- |
| | | | UUGUCAGAAU | | | | SpBE3 |
| C140Y | TGC | TAC | AAAUAUGCAG | 404 | (TAG) | 20 (C8) | SpBE3 |
| | | | UUUGUCAGAA | | | | |
| C140Y | TGC | TAC | UCAUAAAUAU | 405 | (AGAA) | 20 (C12) | VQR- |
| | | | GCAGUUUGUC | | | | SpBE3 |
| C140Y | TGC | TAC | GUCAUAAAUA | 406 | (CAG) | 20 (C13) | SpBE3 |
| | | | UGCAGUUUGU | | | | |
| C140Y | TGC | TAC | CAGUUUGUCA | 407 | (CATGAT) | 20 (C1) | KKH- |
| | | | GAAUAGUGCA | | | | SaBE3 |
| C140Y | TGC | TAC | AUAAAUAUGC | 408 | (AATAGT) | 20 (C10) | KKH- |
| | | | AGUUUGUCAG | | | | SaBE3 |
| C140Y | TGC | TAC | GUCAUAAAUA | 409 | (CAGAAT) | 20 (C13) | SaBE3 |
| | | | UGCAGUUUGU | | | | |
| C140Y | TGC | TAC | GGUCAUAAAU | 410 | (TCAGAAT) | 20 (C14) | St1BE3 |
| | | | AUGCAGUUUG | | | | |
| P148L7S/F | CCA | YYA | CCAUGAAUAA | 411 | (TGG) | 20 (C12/13) | SpBE3 |
| | | | CCCACCGGAC | | | | |
| P148L7S/F | CCA | YYA | CAUGAAUAAC | 412 | (GGAC) | 20 (C11/12) | VQR- |
| | | | CCACCGGACU | | | | SpBE3 |
| P148L/S/F | CCA | YYA | AUAACCCACC | 413 | (AAAAAT) | 20 (C6-10) | KKH- |
| | | | GGACUGGACC | | | | SaBE3 |
| P149US/F | CCG | YYG | ACCGGACUGG | 414 | (TCGAGT) | 20 (C2/3) | SaBE3 |
| | | | ACCAAAAAUG | | | | |
| G161R | GGA | ARR | AAAGUAUAUA | 415 | (AGTG) | 20 (C13) | VQR- |
| | | | UUCCAGUAAA | | | | SpBE3 |
| G161R | GGA | ARR | UCAAAAGUAU | 416 | (AAAAGT) | 20 (C16) | KKH- |
| | | | AUAUUCCAGU | | | | SaBE3 |
| G179R | GGA | ARR | CUACACAGAA | 417 | (AGG) | 20 (C-1) | SpBE3 |
| | | | GCCUCUUGCA | | | | |
| G179R | GGA | ARR | CCUACACAGA | 418 | (AAG) | 20 (C1) | SpBE3 |
| | | | AGCCUCUUGC | | | | |
| G179R | GGA | ARR | AAGUGAAUUC | 419 | (AAG) | 20 (C12) | SpBE3 |
| | | | UCCUACACAG | | | | |
| G179R | GGA | ARR | AAAAGUGAAU | 420 | (AGAA) | 20 (C14) | VQR- |
| | | | UCUCCUACAC | | | | SpBE3 |
| G179R | GGA | ARR | CCUACACAGA | 421 | (AAGGAT) | 20 (C1) | SaBE3 |
| | | | AGCCUCUUGC | | | | |
| G179R | GGA | ARR | AGAAAAGUGA | 422 | (ACAGAAG) | 20 (C16) | St1BE3 |
| | | | AUUCUCCUAC | | | | |
| P187L/S/F | CCG | YYG | UUCUUCGUGA | 423 | (TGG) | 20 (C12/13) | SpBE3 |
| | | | CCCGUGGAAC | | | | |
| P187L/S/F | CCG | YYG | UCGUGACCCG | 424 | (TGG) | 20 (C8/9) | SpBE3 |
| | | | UGGAACUGGC | | | | |
| P187L/S/F | CCG | YYG | CGUGACCCGU | 425 | (GGAT) | 20 (C7/8) | VQR- |
| | | | GGAACUGGCU | | | | SpBE3 |
| P187L/S/F | CCG | YYG | UUCGUGACCC | 426 | (CTGGAT) | 20 (C9/10) | SaBE3 |
| | | | GUGGAACUGG | | | | |
| P229L/S/F | CCA | YYA | UUUCUGUAAU | 427 | (AAG) | 20 (C12/13) | SpBE3 |
| | | | CCCAGGUAAG | | | | |
| P229L7S/F | CCA | YYA | AAUCCCAGGU | 428 | (TGG) | 20 (C5/6) | SpBE3 |
| | | | AAGAAGUAAU | | | | |
| P229L/S/F | CCA | YYA | AUCCCAGGUA | 429 | (GGTG) | 20 (C4/5) | VQR- |
| | | | AGAAGUAAUU | | | | SpBE3 |
| P229L/S/F | CCA | YYA | CCCAGGUAAG | 430 | (TGTG) | 20 (C2/3) | VQR- |
| | | | AAGUAAUUGG | | | | SpBE3 |
| P229US/F | CCA | YYA | UAUUUCUGUA | 431 | (AGAAGT) | 20 (C14/15) | KKH- |
| | | | AUCCCAGGUA | | | | SaBE3 |
| P229L/S/F | CCA | YYA | UUCUGUAAUC | 432 | (AGTAAT) | 20 (C11/12) | KKH- |
| | | | CCAGGUAAGA | | | | SaBE3 |
| P229US/F | CCA | YYA | GUAAUCCCAG | 433 | (ATTGGT) | 20 (C7/8) | KKH- |
| | | | GUAAGAAGUA | | | | SaBE3 |
| P229L/S/F | CCA | YYA | AAUCCCAGGU | 434 | (TGGTG) | 20 (C5/6) | St3BE3 |
| | | | AAGAAGUAAU | | | | |
| G236R | GGG | ARR | CCUACAAUUG | 435 | (TGAA) | 20 (C1) | VQR- |
| | | | UCUUCAGGCC | | | | SpBE3 |
| G236R | GGG | ARR | AAGCCCCUAC | 436 | (AGG) | 20 (C6) | SpBE3 |
| | | | AAUUGUCUUC | | | | |
| G236R | GGG | ARR | AAAGCCCCUA | 437 | (CAG) | 20 (C7) | SpBE3 |
| | | | CAAUUGUCUU | | | | |
| G236R | GGG | ARR | CUACAAUUGU | 438 | (GAAAAT) | 20 (C-1) | KKH- |
| | | | CUUCAGGCCU | | | | SaBE3 |
| C255Y | TGT | TAT | ACAGAACACA | 439 | (TGAC) | 20 (C2) | VQR- |
| | | | GUCAGGAUCA | | | | SpBE3 |
| C255Y | TGT | TAT | ACUCAGACAG | 440 | (GGAT) | 20 (C8) | VQR- |
| | | | AACACAGUCA | | | | SpBE3 |
| C255Y | TGT | TAT | CACUCAGACA | 441 | (AGG) | 20 (C9) | SpBE3 |
| | | | GAACACAGUC | | | | |
| C255Y | TGT | TAT | ACACUCAGAC | 442 | (CAG) | 20 (C10) | SpBE3 |
| | | | AGAACACAGU | | | | |
| C255Y | TGT | TAT | ACACUCAGAC | 443 | (CAGGAT) | 20 (C10) | SaBE3 |
| | | | AGAACACAGU | | | | |
| G263R | GGA | ARR | CAAUUAGUGC | 444 | (AGAC) | 20 (C-1) | VQR- |
| | | | AAACACACUC | | | | SpBE3 |
| G263R | GGA | ARR | CCAAUUAGUG | 445 | (CAG) | 20 (C1) | SpBE3 |
| | | | CAAACACACU | | | | |
| C275Y | TGT | TAT | UUCGAAAACA | 446 | (AGG) | 20 (C9) | SpBE3 |
| | | | UUUAUGCUUC | | | | |
| C275Y | TGT | TAT | UUUCGAAAAC | 447 | (CAG) | 20 (C10) | SpBE3 |
| | | | AUUUAUGCUU | | | | |
| C275Y | TGT | TAT | AUUUCGAAAA | 448 | (TCAGGT) | 20 (C11) | KKH- |
| | | | CAUUUAUGCU | | | | SaBE3 |
| C315Y | TGT | TAT | CCACAAAGGA | 449 | (GGAT) | 20 (C4) | VQR- |
| | | | GAGCAUCUUU | | | | SpBE3 |
| C315Y | TGT | TAT | ACCACAAAGG | 450 | (TGG) | 20 (C5) | SpBE3 |
| | | | AGAGCAUCUU | | | | |
| C315Y | TGT | TAT | UGUGCUGAAA | 451 | (GAG) | 20 (C14) | SpBE3 |
| | | | CCACAAAGGA | | | | |
| C315Y | TGT | TAT | AACCACAAAG | 452 | (TTGGAT) | 20 (C6) | SaBE3 |
| | | | GAGAGCAUCU | | | | |
| C324Y | TGT | TAT | ACACUGACUA | 453 | (AGAA) | 20 (C2) | VQR- |
| | | | CACACGAGAA | | | | SpBE3 |
| C324Y | TGT | TAT | GACACUGACU | 454 | (AAG) | 20 (C3) | SpBE3 |
| | | | ACACACGAGA | | | | |
| C324Y | TGT | TAT | CUGGACACUG | 455 | (AGAA) | 20 (C6) | VQR- |
| | | | ACUACACACG | | | | SpBE3 |
| C324Y | TGT | TAT | UCUGGACACU | 456 | (GAG) | 20 (C7) | SpBE3 |
| | | | GACUACACAC | | | | |
| C324Y | TGT | TAT | GGACACUGAC | 457 | (AAAGAAC) | 20 (C4) | St1BE3 |
| | | | UACACACGAG | | | | |
| C324Y | TGT | TAT | CUCUGGACAC | 458 | (CGAGAAA) | 20 (C8) | St1BE3 |
| | | | UGACUACACA | | | | |
| C325Y | TGT | TAT | CUCUGGACAC | 459 | (CGAG) | 20 (C8) | EQR- |
| | | | UGACUACACA | | | | SpBE3 |
| P325L/S/F | CCA | YYA | AGUGUCCAGA | 460 | (TGTG) | 20 (C6/7) | VQR- |
| | | | GGGGUACACC | | | | SpBE3 |
| P325L/S/F | CCA | YYA | UGUCCAGAGG | 461 | (TGTG) | 20 (C4/5) | VQR- |
| | | | GGUACACCUG | | | | SpBE3 |
| P325LVS/F | CCA | YYA | UCCAGAGGGG | 462 | (TGAA) | 20 (C2/3) | VQR- |
| | | | UACACCUGUG | | | | SpBE3 |
| P325L/S/F | CCA | YYA | CCAGAGGGGU | 463 | (GAAAAT) | 20 (C1/2) | KKH- |
| | | | ACACCUGUGU | | | | SaBE3 |
| C330Y | TGT | TAT | AGGUGUACCC | 464 | (TGAC) | 20 (C-1) | VQR- |
| | | | CUCUGGACAC | | | | SpBE3 |
| C330Y | TGT | TAT | UCACACAGGU | 465 | (GGAC) | 20 (C6) | VQR- |
| | | | GUACCCCUCU | | | | SpBE3 |
| C330Y | TGT | TAT | UUCACACAGG | 466 | (TGG) | 20 (C7) | SpBE3 |
| | | | UGUACCCCUC | | | | |
| P337L/S/F | CCT | YYT | AUUGGCAGAA | 467 | (TGG) | 20 (C13/14) | SpBE3 |
| | | | ACCCUGAUUA | | | | |
| P337L/S/F | CCT | YYT | AAACCCUGAU | 468 | (CGAG) | 20 (C5/6) | EQR- |
| | | | UAUGGCUACA | | | | SpBE3 |
| P337L/S/F | CCT | YYT | AACCCUGAUU | 469 | (GAG) | 20 (C4/5) | SpBE3 |
| | | | AUGGCUACAC | | | | |
| P532L/S/F | CCC | YYC | UACCCCCAAU | 470 | (CCAAAT) | 20 (C5/6) | KKH- |
| | | | CAGGUACCAC | | | | SaBE3 |
| P536L/S/F | CCA | YYA | UGCAGUCACC | 471 | (CGTG) | 20 (C9/10) | VQR- |
| | | | ACUCAGCAUU | | | | SpBE3 |
| P536L/S/F | CCA | YYA | CAGUCACCAC | 472 | (TGG) | 20 (C7/8) | SpBE3 |
| | | | UCAGCAUUCG | | | | |
| P591L/S/F | CCC | YYC | GCUCACUGUU | 473 | (AGAC) | 20 (C15/16) | VQR- |
| | | | UGUGCCCCAC | | | | SpBE3 |
| P591L/S/F | CCC | YYC | UGUUUGUGCC | 474 | (CAG) | 20 (C9/10) | SpBE3 |
| | | | CCACAGACCC | | | | |
| P591L7S/F | CCC | YYC | GUUUGUGCCC | 475 | (AGG) | 20 (Ca8/9) | SpBE3 |
| | | | CACAGACCCC | | | | |
| P591L/S/F | CCC | YYC | UUUGUGCCCC | 476 | (GGAG) | 20 (C7/8) | EQR- |
| | | | ACAGACCCCA | | | | SpBE3 |
| P591L/S/F | CCC | YYC | UUGUGCCCCA | 477 | (GAG) | 20 (C6/7) | SpBE3 |
| | | | CAGACCCCAG | | | | |
| P591L/S/F | CCC | YYC | UGUGCCCCAC | 478 | (AGCG) | 20 (C5/6) | VRER- |
| | | | AGACCCCAGG | | | | SpBE3 |
| P591L/S/F | CCC | YYC | UGCCCCACAG | 479 | (CGAC) | 20 | VQR- |
| | | | ACCCCAGGAG | | | (C3/4/12) | SpBE3 |
| P591L/S/F | CCC | YYC | GUUUGUGCCC | 480 | (AGGAG) | 20 (C8/9) | St3BE3 |
| | | | CACAGACCCC | | | | |
| P594L7S/F | CCC | YYC | CACAGACCCC | 481 | (CAG) | 20 (C7/8) | SpBE3 |
| | | | AGGAGCGACG | | | | |
| P594LVS/F | CCC | YYC | AGACCCCAGG | 482 | (CAG) | 20 (C4/5) | SpBE3 |
| | | | AGCGACGCAG | | | | |
| P594L7S/F | CCC | YYC | ACAGACCCCA | 483 | (AGCAGT) | 20 (C6/7) | KKH- |
| | | | GGAGCGACGC | | | | SaBE3 |
| P609/10L/S/ | CCA | YYA | UAGGUCCCCA | 484 | (CGG) | 20 (C8-12) | SpBE3 |
| F | | | CCAAUGCUGC | | | | |
| P609/10L/S/ | CCA | YYA | AGGUCCCCAC | 485 | (GGTG) | 20 (C7-11) | VQR- |
| F | | | CAAUGCUGCC | | | | SpBE3 |
| P609/10L/S/ | CCA | YYA | GUCCCCACCA | 486 | (TGAA) | 20 (C5-9) | VQR- |
| F | | | AUGCUGCCGG | | | | SpBE3 |
| P609/10L/S/ | CCA | YYA | CCACCAAUGC | 487 | (CGG) | 20 (C1-4) | SpBE3 |
| F | | | UGCCGGUGAA | | | | |
| P609/10L/S/ | CCA | YYA | AGUACCUCCC | 488 | (GCCGGT) | 20 (C10-14) | KKH- |
| F | | | CACCAAUGCU | | | | SaBE3 |
| P609/10L7S/ | CCA | YYA | UAGGUCCCCA | 489 | (CGGTG) | 20 (C8-12) | St3BE3 |
| F | | | CCAAUGCUGC | | | | |
| P610L/S/F | CCA | YYA | CACCAAUGCU | 490 | (GGG) | 20 (C3/4) | SpBE3 |
| | | | GCCGGUGAAC | | | | |
| P610L/S/F | CCA | YYA | ACCAAUGCUG | 491 | (GGAA) | 20 (C2/3) | VQR- |
| | | | CCGGUGAACG | | | | SpBE3 |
| P613L7S/F | CCG | YYG | CACCAAUGCU | 492 | (GGG) | 20 (C12/13) | SpBE3 |
| | | | GCCGGUGAAC | | | | |
| P613L7S/F | CCG | YYG | ACCAAUGCUG | 493 | (GGAA) | 20 (C11/12) | VQR- |
| | | | CCGGUGAACG | | | | SpBE3 |
| P613L/S/F | CCG | YYG | CCGGUGAACG | 494 | (CAG) | 20 (C1/2) | SpBE3 |
| | | | GGAAAAUGCA | | | | |
| P613L7S/F | CCG | YYG | CCAAUGCUGC | 495 | (GAAAAT) | 20 (C10/11) | KKH- |
| | | | CGGUGAACGG | | | | SaBE3 |
| P640L/S/F | CCC | YYC | CCCUCAUGCU | 496 | (CAG) | 20 (C12/13) | SpBE3 |
| | | | CCCCAAUGGA | | | | |
| P640US/F | CCC | YYC | CCCCAAUGGA | 497 | (CAG) | 20 (C2/3) | SpBE3 |
| | | | CAGCUUCUGC | | | | |
| P640L7S/F | CCC | YYC | CCCAAUGGAC | 498 | (AGAG) | 20 (C1/2) | EQR- |
| | | | AGCUUCUGCC | | | | SpBE3 |
| P640L/S/F | CCC | YYC | CCCAAUGGAC | 499 | (AGAGGT) | 20 (C1/2) | KKH- |
| | | | AGCUUCUGCC | | | | SaBE3 |
| P646L7S/F | CCA | YYA | GCUUCUGCCA | 500 | (TAG) | 20 (C8/9) | SpBE3 |
| | | | GAGGUGAUAA | | | | |
| P646L7S/F | CCA | YYA | CUUCUGCCAG | 501 | (AGAT) | 20 (C7/8) | VQR- |
| | | | AGGUGAUAAU | | | | SpBE3 |
| P646L/S/F | CCA | YYA | UGCCAGAGGU | 502 | (AAG) | 20 (C3/4) | SpBE3 |
| | | | GAUAAUAGAU | | | | |
| P646L7S/F | CCA | YYA | GCCAGAGGUG | 503 | (AGG) | 20 (C2/3) | SpBE3 |
| | | | AUAAUAGAUA | | | | |
| P646L/S/F | CCA | YYA | GGACAGCUUC | 504 | (GATAAT) | 20 (C13/14) | KKH- |
| | | | UGCCAGAGGU | | | | SaBE3 |
| P646L/S/F | CCA | YYA | AGCUUCUGCC | 505 | (ATAGAT) | 20 (C9/10) | KKH- |
| | | | AGAGGUGAUA | | | | SaBE3 |
| P683L7S/F | CCC | YYC | AUGCUGAAUG | 506 | (CAG) | 20 (C13/14) | SpBE3 |
| | | | AUCCCAACCU | | | | |
| P683L/S/F | CCC | YYC | UGCUGAAUGA | 507 | (AGAC) | 20 (02/13) | VQR- |
| | | | UCCCAACCUC | | | | SpBE3 |
| P683LVS/F | CCC | YYC | UGAAUGAUCC | 508 | (CAG) | 20 (C9/10) | SpBE3 |
| | | | CAACCUCAGA | | | | |
| P683L7S/F | CCC | YYC | GAAUGAUCCC | 509 | (AGAG) | 20 (C8/9) | EQR- |
| | | | AACCUCAGAC | | | | SpBE3 |
| P683L/S/F | CCC | YYC | AAUGAUCCCA | 510 | (GAG) | 20 (C7/8) | SpBE3 |
| | | | ACCUCAGACA | | | | |
| P683L7S/F | CCC | YYC | AUGAUCCCAA | 511 | (AGAG) | 20 (C6/7) | EQR- |
| | | | CCUCAGACAG | | | | SpBE3 |
| P683L7S/F | CCC | YYC | UGAUCCCAAC | 512 | (GAG) | 20 (C5/6) | SpBE3 |
| | | | CUCAGACAGA | | | | |
| P683L/S/F | CCC | YYC | GAUCCCAACC | 513 | (AGCAAT) | 20 (C4/5) | KKH- |
| | | | UCAGACAGAG | | | | SaBE3 |
| P711US/F | CCA | YYA | CAGACAAAAA | 514 | (GGTG) | 20 (04/15) | VQR- |
| | | | UGUCCACCUU | | | | SpBE3 |
| P711US/F | CCA | YYA | GACAAAAAUG | 515 | (TGG) | 20 (02/13) | SpBE3 |
| | | | UCCACCUUGG | | | | |
| P711/2L/S/F | CCA | YYA | AAAUGUCCAC | 516 | (CAG) | 20 (C7-11) | SpBE3 |
| | | | CUUGGUGGUA | | | | |
| P711/2L/S/F | CCA | YYA | AAUGUCCACC | 517 | (AGAT) | 20 (C6-10) | VQR- |
| | | | UUGGUGGUAC | | | | SpBE3 |
| P711LVS/F | CCA | YYA | CAGACAAAAA | 518 | (GGTGGT) | 20 (04/15) | KKH- |
| | | | UGUCCACCUU | | | | SaBE3 |
| P711/2L/S/F | CCA | YYA | AAAAUGUCCA | 519 | (ACAGAT) | 20 (C8-12) | KKH- |
| | | | CCUUGGUGGU | | | | SaBE3 |
| P711L7S/F | CCA | YYA | CCAGACAAAA | 520 | (TGGTG) | 20 (C15/16) | St3BE3 |
| | | | AUGUCCACCU | | | | |
| P728L/S/F | CCA | YYA | GAAUUGCUCU | 521 | (TAAAAT) | 20 (C11/12) | KKH- |
| | | | CCAUAUUGGA | | | | SaBE3 |
| P728L/S/F | CCA | YYA | UCCAUAUUGG | 522 | (AAAAGT) | 20 (C2/3) | KKH- |
| | | | AUAAAAUUCA | | | | SaBE3 |
| P744L/S/F | CCT | YYT | AUUGUAAUGG | 523 | (AGAT) | 20 (C13/14) | VQR- |
| | | | AUCCUUUUGU | | | | SpBE3 |
| P744L/S/F | CCT | YYT | UUAUUGUAAU | 524 | (GTAGAT) | 20 (C15/16) | KKH- |
| | | | GGAUCCUUUU | | | | SaBE3 |
| P744L/S/F | CCT | YYT | AUGGAUCCUU | 525 | (TGCAAT) | 20 (C7/8) | KKH- |
| | | | UUGUAGAUCU | | | | SaBE3 |
| C753V | TGC | TAC | CUAUGCAAAU | 526 | (AGAT) | 20 (C6) | VQR- |
| | | | GGUAAUUGCA | | | | SpBE3 |
| C753Y | TGC | TAC | ACUAUGCAAA | 527 | (AAG) | 20 (C7) | SpBE3 |
| | | | UGGUAAUUGC | | | | |
| C753Y | TGC | TAC | AACUAUGCAA | 528 | (CAAGAT) | 20 (C8) | KKH- |
| | | | AUGGUAAUUG | | | | SaBE3 |
| P767L/S/F | CCA | YYA | AUGGAACACC | 529 | (TGAG) | 20 (C13/14) | EQR- |
| | | | ACCCAAUGAC | | | | SpBE3 |
| P767L/S/F | CCA | YYA | UGGAACACCA | 530 | (GAG) | 20 (C12/13) | SpBE3 |
| | | | CCCAAUGACU | | | | |
| P767L/S/F | CCA | YYA | GGAACACCAC | 531 | (AGG) | 20 (C11/12) | SpBE3 |
| | | | CCAAUGACUG | | | | |
| P767US/F | CCA | YYA | GAACACCACC | 532 | (GGAA) | 20 (C10/11) | VQR- |
| | | | CAAUGACUGA | | | | SpBE3 |
| P767L/S/F | CCA | YYA | GGAACACCAC | 533 | (AGGAAT) | 20 (C11/12) | SaBE3 |
| | | | CCAAUGACUG | | | | |
| P767LVS/F | CCA | YYA | ACCCAAUGAC | 534 | (AAAAAT) | 20 (C3/4) | KKH- |
| | | | UGAGGAAUUC | | | | SaBE3 |
| G779R | GGA | ARR | UCCUAUAGCA | 535 | (TGAA) | 20 (C2) | VQR- |
| | | | AGUACAUUUU | | | | SpBE3 |
| G779R | GGA | ARR | CUUACCAAAU | 536 | (AAG) | 20 (C13) | SpBE3 |
| | | | UUCCUAUAGC | | | | |
| G779R | GGA | ARR | UUCCUAUAGC | 537 | (TTGAAT) | 20 (C3) | SaBE3 |
| | | | AAGUACAUUU | | | | |
| G779R | GGA | ARR | GACUUACCAA | 538 | (GCAAGT) | 20 (C15) | KKH- |
| | | | AUUUCCUAUA | | | | SaBE3 |
| G785R | GGA | ARR | UUCCAGUAAA | 539 | (AGAA) | 20 (C3) | VQR- |
| | | | GACCUAAGUG | | | | SpBE3 |
| G785R | GGA | ARR | AUUCCAGUAA | 540 | (GAG) | 20 (C4) | SpBE3 |
| | | | AGACCUAAGU | | | | |
| G785R | GGA | ARA | AAGAUUCCAG | 541 | (AGTG) | 20 (C7) | VQR- |
| | | | UAAAGACCUA | | | | SpBE3 |
| G785R | GGA | ARA | AAAGAUUCCA | 542 | (AAG) | 20 (C8) | SpBE3 |
| | | | GUAAAGACCU | | | | |
| G785R | GGA | ARA | AGCUGCAAAG | 543 | (AGAC) | 20 (C14) | VQR- |
| | | | AUUCCAGUAA | | | | SpBE3 |
| G785R | GGA | ARA | CCAGUAAAGA | 544 | (AAAAAT) | 20 (C1) | KKH- |
| | | | CCUAAGUGAG | | | | SaBE3 |
| G785R | GGA | ARA | GCAAAGAUUC | 545 | (CTAAGT) | 20 (C10) | KKH- |
| | | | CAGUAAAGAC | | | | SaBE3 |
| G785R | GGA | ARA | GAUUCCAGUA | 546 | (TGAGAAA) | 20 (C5) | St1BE3 |
| | | | AAGACCUAAG | | | | |
| G786R | GGA | ARR | GAUUCCAGUA | 547 | (TGAG) | 20 (C5) | EQR- |
| | | | AAGACCUAAG | | | | SpBE3 |
| P800US/F | CCA | YYA | GGAUCCAUAU | 548 | (AAG) | 20 (C5/6) | SpBE3 |
| | | | GAGUAUUUCC | | | | |
| P800L/S/F | CCA | YYA | UCCAUAUGAG | 549 | (TAG) | 20 (C2/3) | SpBE3 |
| | | | UAUUUCCAAG | | | | |
| P800L/S/F | CCA | YYA | CCAUAUGAGU | 550 | (AGG) | 20 (C1/2) | SpBE3 |
| | | | AUUUCCAAGU | | | | |
| P800L7S/F | CCA | YYA | AUGGAUCCAU | 551 | (CCAAGT) | 20 (C7/8) | KKH- |
| | | | AUGAGUAUUU | | | | SaBE3 |
| G830R | GGA | ARA | CCUUCCACAU | 552 | (GAG) | 20 (Cl) | SpBE3 |
| | | | CUGCUAGAAA | | | | |
| G830R | GGA | ARA | AUCCUUCCAC | 553 | (AAG) | 20 (C3) | SpBE3 |
| | | | AUCUGCUAGA | | | | |
| G830R | GGA | ARA | ACAAUCCUUC | 554 | (AGAA) | 20 (C6) | VQR- |
| | | | CACAUCUGCU | | | | SpBE3 |
| G830R | GGA | ARA | GACAAUCCUU | 555 | (TAG) | 20 (C7) | SpBE3 |
| | | | CCACAUCUGC | | | | |
| G830R | GGA | ARA | UGACAAUCCU | 556 | (CTAGAAA) | 20 (C8) | St1BE3 |
| | | | UCCACAUCUG | | | | |
| G831R | GGA | ARA | UCCUUCCACA | 557 | (AGAG) | 20 (C2) | EQR- |
| | | | UCUGCUAGAA | | | | SpBE3 |
| P850US/F | CCA | YYA | CUGGCCAACA | 558 | (TGAT) | 20 (C5/6) | VQR- |
| | | | UUGAACAUGC | | | | SpBE3 |
| P850LVS/F | CCA | YYA | UCCUGGCCAA | 559 | (GCTGAT) | 20 (C7/8) | KKH- |
| | | | CAUUGAACAU | | | | |
| | | | | | | | SaBE3 |
| P850L/S/F | CCA | YYA | CCAACAUUGA | 560 | (TAAGAT) | 20 (C1/2) | KKH- |
| | | | ACAUGCUGAU | | | | SaBE3 |
| C895Y | TGT | TAT | AUUCUUUGUA | 561 | (AAG) | 20 (C-1) | SpBE3 |
| | | | GCUCUUACCA | | | | |
| C895Y | TGT | TAT | UCUUGCAGAC | 562 | (TAG) | 20 (C12) | SpBE3 |
| | | | ACAUUCUUUG | | | | |
| C897Y | TGC | TAC | UCUUGCAGAC | 563 | (TAG) | 20 (C6) | SpBE3 |
| | | | ACAUUCUUUG | | | | |
| C903Y | TGT | TAT | ACAGUCAUCA | 564 | (AGAC) | 20 (C2) | VQR- |
| | | | UUGAUCUUGC | | | | SpBE3 |
| C903Y | TGT | TAT | UACAGUCAUC | 565 | (CAG) | 20 (C3) | SpBE3 |
| | | | AUUGAUCUUG | | | | |
| C903Y | TGT | TAT | UGGGAGCGUA | 566 | (TGAT) | 20 (C11) | VQR- |
| | | | CAGUCAUCAU | | | | SpBE3 |
| P906L/S/F | CCA | YYA | UACGCUCCCA | 567 | (TGAA) | 20 (C8/9) | VQR- |
| | | | CGGUGGCACA | | | | SpBE3 |
| P906L/S/F | CCA | YYA | CUCCCACGGU | 568 | (CGAC) | 20 (C4/5) | VQR- |
| | | | GGCACAUGAA | | | | SpBE3 |
| C925Y | TGT | TAT | ACAGCACGCG | 569 | (AGG) | 20 (C2) | SpBE3 |
| | | | GAACACAAUC | | | | |
| C925Y | TGT | TAT | CACAGCACGC | 570 | (CAG) | 20 (C3) | SpBE3 |
| | | | GGAACACAAU | | | | |
| C925Y | TGT | TAT | CCACUCUCCA | 571 | (GGAA) | 20 (C13) | VQR- |
| | | | CACAGCACGC | | | | SpBE3 |
| C925Y | TGT | TAT | UCCACUCUCC | 572 | (CGG) | 20 (C14) | SpBE3 |
| | | | ACACAGCACG | | | | |
| C925Y | TGT | TAT | UAUCCACUCU | 573 | (CGCG) | 20 (C16) | VRER- |
| | | | CCACACAGCA | | | | SpBE3 |
| C925Y | TGT | TAT | UCUCCACACA | 574 | (CACAAT) | 20 (C9) | KKH- |
| | | | GCACGCGGAA | | | | SaBE3 |
| C935Y | TGT | TAT | GACCUCCAUA | 575 | (TGG) | 20 (C13) | SpBE3 |
| | | | CAGUCCCACA | | | | |
| C935Y | TGT | TAT | GCGACCUCCA | 576 | (CATGGT) | 20 (C15) | KKH- |
| | | | UACAGUCCCA | | | | SaBE3 |
| C944Y | TGC | TAC | AAGGCACAUA | 577 | (CGAC) | 20 (C5) | VQR- |
| | | | GCUUGACCAG | | | | SpBE3 |
| C944Y | TGC | TAC | AUAAGGCACA | 578 | (AGCG) | 20 (C7) | VRER- |
| | | | UAGCUUGACC | | | | SpBE3 |
| C944Y | TGC | TAC | AAUAAGCCAC | 579 | (CAG) | 20 (C8) | SpBE3 |
| | | | AUAGCUUGAC | | | | |
| C944Y | TGC | TAC | AAACAAUAAG | 580 | (TGAC) | 20 (C12) | VQR- |
| | | | GCACAUAGCU | | | | SpBE3 |
| G955R | GGA | ARA | CACCAGGUUU | 581 | (TGAC) | 20 (C11) | VQR- |
| | | | CCAAUGACCA | | | | SpBE3 |
| P983L7S/F | CCT | YYT | ACCCUGAUGC | 582 | (CAG) | 20 (C3/4) | SpBE3 |
| | | | AAACAACCUC | | | | |
| P983L7S/F | CCT | YYT | CCCUGAUGCA | 583 | (AGAT) | 20 (C2/3) | VQR- |
| | | | AACAACCUCC | | | | SpBE3 |
| P983L/S/F | CCT | YYT | GACCCUGAUG | 584 | (CCAGAT) | 20 (C4/5) | KKH- |
| | | | CAAACAACCU | | | | SaBE3 |
| P1018LVS/F | CCA | YYA | UCCAAAAAGC | 585 | (CAG) | 20 (C10/11) | SpBE3 |
| | | | CAAAGAUUUC | | | | |
| P1018LVS/F | CCA | YYA | CCAAAAAGCC | 586 | (AGG) | 20 (C9/10) | SpBE3 |
| | | | AAAGAUUUCC | | | | |
| P1018LVS/F | CCA | YYA | CAAAAAGCCA | 587 | (GGG) | 20 (C8/9) | SpBE3 |
| | | | AAGAUUUCCA | | | | |
| P1018L7S/F | CCA | YYA | AAAAAGCCAA | 588 | (GGAG) | 20 (C7/8) | EQR- |
| | | | AGAUUUCCAG | | | | SpBE3 |
| P1018L7S/F | CCA | YYA | AAAAGCCAAA | 589 | (GAG) | 20 (C6/7) | SpBE3 |
| | | | GAUUUCCAGG | | | | |
| P1018LVS/F | CCA | YYA | AAAGCCAAAG | 590 | (AGAT) | 20 (C5/6) | VQR- |
| | | | AUUUCCAGGG | | | | SpBE3 |
| P1018LVS/F | CCA | YYA | CCAAAGAUUU | 591 | (AAG) | 20 (C1/2) | SpBE3 |
| | | | CCAGGGAGAU | | | | |
| P1018LVS/F | CCA | YYA | AAAAAGCCAA | 592 | (GGAGAT) | 20 (C7/8) | KKH- |
| | | | AGAUUUCCAG | | | | SaBE3 |
| P1018LVS/F | CCA | YYA | CAAAAAGCCA | 593 | (GGGAG) | 20 (C8/9) | St3BE3 |
| | | | AAGAUUUCCA | | | | |
| P1083L7S/F | CCC | YYC | UAUUCACAAU | 594 | (CAG) | 20 (C11/12) | SpBE3 |
| | | | CCCAGCCUCA | | | | |
| P1083LVS/F | CCC | YYC | AUUCACAAUC | 595 | (AGTG) | 20 (C10/11) | VQR- |
| | | | CCAGCCUCAC | | | | SpBE3 |
| P1083L7S/F | CCC | YYC | UCACAAUCCC | 596 | (TGAC) | 20 (C8/9) | VQR- |
| | | | AGCCUCACAG | | | | SpBE3 |
| P1083LVS/F | CCC | YYC | CAAUCCCAGC | 597 | (CAG) | 20 (C5/6) | SpBE3 |
| | | | CUCACAGUGA | | | | |
| P1083L/S/F | CCC | YYC | AAUCCCAGCC | 598 | (AGTG) | 20 (C4/5) | VQR- |
| | | | UCACAGUGAC | | | | SpBE3 |
| P1083L7S/F | CCC | YYC | UUUAUUCACA | 599 | (CACAGT) | 20 (C13/14) | KKH- |
| | | | AUCCCAGCCU | | | | SaBE3 |
| P1083L/S/F | CCC | YYC | CACAAUCCCA | 600 | (GACAGT) | 20 (C7/8) | KKH- |
| | | | GCCUCACAGU | | | | SaBE3 |
| P1083L/S/F | CCC | YYC | CCCAGCCUCA | 601 | (GCCAAT) | 20 (C1/2) | KKH- |
| | | | CAGUGACAGU | | | | SaBE3 |
| P1090US/F | CCA | YYA | GUGACAGUGC | 602 | (TGG) | 20 (C10/11) | SpBE3 |
| | | | CAAUUGCACC | | | | |
| P1090LVS/F | CCA | YYA | UGACACUCCC | 603 | (GGG) | 20 (C9/10) | SpBE3 |
| | | | AAUUGCACCU | | | | |
| P1090L7S/F | CCA | YYA | GACAGUGCCA | 604 | (GGG) | 20 (C8/9) | SpBE3 |
| | | | AUUGCACCUG | | | | |
| P1090L/S/F | CCA | YYA | ACACUGCCAA | 605 | (GGAA) | 20 (C7/8) | VQR- |
| | | | UUGCACCUGG | | | | SpBE3 |
| P1090/3L/S/ | CCA | YYA | CCAAUUGCAC | 606 | (CGAT) | 20 | VQR- |
| F | | | CUGGGGAAUC | | | (C1/2/10/11 | SpBE3 |
| | | | | | | ) | |
| P1090LVS/F | CCA | YYA | GACAGUGCCA | 607 | (GGGAAT) | 20 (C8/9) | SaBE3 |
| | | | AUUGCACCUG | | | | |
| P1090/3L/S/ | CCA | YYA | UGCCAAUUGC | 608 | (TCCGAT) | 20 | KKH- |
| F | | | ACCUGGGGAA | | | (C3/4/13) | SaBE3 |
| P1090L7S/F | CCA | YYA | GUGACAGUGC | 609 | (TGGGG) | 20 (C10/11) | St3BE3 |
| | | | CAAUUGCACC | | | | |
| P1093LVS/F | CCT | YYT | UGCACCUGGG | 610 | (TGG) | 20 (C5/6) | SpBE3 |
| | | | GAAUCCGAUU | | | | |
| P1093L/S/F | CCT | YYT | GCACCUGGGG | 611 | (GGAA) | 20 (C4/5) | VQR- |
| | | | AAUCCGAUUU | | | | SpBE3 |
| P1093LVS/F | CCT | YYT | CACCUGGGGA | 612 | (GAAAAT) | 20 (C3/4) | KKH- |
| | | | AUCCGAUUUG | | | | SaBE3 |
| P1133US/F | CCT | YYT | ACAGUUGAUA | 613 | (TGG) | 20 (C13/14) | SpBE3 |
| | | | ACCCUUUGCC | | | | |
| P1133L/S/F | CCT | YYT | CAGUUGAUAA | 614 | (GGAG) | 20 (Cl 2/13) | EQR- |
| | | | CCCUUUGCCU | | | | SpBE3 |
| P1133LVS/F | CCT | YYT | AGUUGAUAAC | 615 | (GAG) | 20 (C11/12) | SpBE3 |
| | | | CCUUUGCCUG | | | | |
| P1133L7S/F | CCT | YYT | GUUGAUAACC | 616 | (AGAA) | 20 (C10/11) | VQR- |
| | | | CUUUGCCUGG | | | | SpBE3 |
| P1133/5L/S/ | CCT | YYT | UGAUAACCCU | 617 | (AAG) | 20 (C8-14) | SpBE3 |
| F | | | UUGCCUGGAG | | | | |
| P1133/5L/S/ | CCT | YYT | GAUAACCCUU | 618 | (AGG) | 20 (C7-14) | SpBE3 |
| F | | | UGCCUGGAGA | | | | |
| P1133/5L/S/ | CCT | YYT | AUAACCCUUU | 619 | (GGAG) | 20 (C6-13) | EQR- |
| F | | | GCCUGGAGAA | | | | SpBE3 |
| P1133/5L/S/ | CCT | YYT | UAACCCUUUG | 620 | (GAG) | 20 (C5-12) | SpBE3 |
| F | | | CCUGGAGAAG | | | | |
| P1133/5L/S/ | CCT | YYT | AACCCUUUGC | 621 | (AGAA) | 20 (C4-11) | VQR- |
| F | | | CUGGAGAAGG | | | | SpBE3 |
| P1133/5L/S/ | CCT | YYT | CCCUUUGCCU | 622 | (AAG) | 20 (C2-9) | SpBE3 |
| F | | | GGAGAAGGAG | | | | |
| P1133/5L/S/ | CCT | YYT | CCUUUGCCUG | 623 | (AGAA) | 20 (C1-8) | VQR- |
| F | | | GAGAAGGAGA | | | | SpBE3 |
| P1133/5L/S/ | CCT | YYT | ACAGUUGAUA | 624 | (TGGAG) | 20 (C13/14) | St3BE3 |
| F | | | ACCCUUUGCC | | | | |
| P1133/5L/S/ | CCT | YYT | CAGUUGAUAA | 625 | (GGAGAAG) | 20 (C12/13) | SHBE3 |
| F | | | CCCUUUGCCU | | | | |
| P1133/5L/S/ | CCT | YYT | GAUAACCCUU | 626 | (AGGAG) | 20 (C7-14) | St3BE3 |
| F | | | UGCCUGGAGA | | | | |
| P1133/5L/S/ | CCT | YYT | AUAACCCUUU | 627 | (GGAGAAG) | 20 (C6-13) | St1BE3 |
| F | | | GCCUGGAGAA | | | | |
| P1133/5L/S/ | CCT | YYT | ACCCUUUGCC | 628 | (GAAGAAG) | 20 (C3-10) | St1BE3 |
| F | | | UGGAGAAGGA | | | | |
| P1135L/S/F | CCT | YYT | UUUGCCUGGA | 629 | (AAG) | 20 (C5/6) | SpBE3 |
| | | | GAAGGAGAAG | | | | |
| P1135LVS/F | CCT | YYT | GCCUGGAGAA | 630 | (CAG) | 20 (C2/3) | SpBE3 |
| | | | GGAGAAGAAG | | | | |
| P1135IVS/F | CCT | YYT | CCUGGAGAAG | 631 | (AGAG) | 20 (C1/2) | EQR- |
| | | | GAGAAGAAGC | | | | SpBE3 |
| P1145L7S/F | CCT | YYT | GAGGCUGAAC | 632 | (CGAT) | 20 (C10/11) | VQR- |
| | | | CUAUGAAUUC | | | | SpBE3 |
| P1145US/F | CCT | YYT | GCUGAACCUA | 633 | (TGAG) | 20 (C7/8) | EQR- |
| | | | UGAAUUCCGA | | | | SpBE3 |
| P1145L7S/F | CCT | YYT | CUGAACCUAU | 634 | (GAG) | 20 (C6/7) | SpBE3 |
| | | | GAAUUCCGAU | | | | |
| P1145LVS/F | CCT | YYT | ACCUAUGAAU | 635 | (CAG) | 20 (C2/3) | SpBE3 |
| | | | UCCGAUGAGC | | | | |
| P1145LVS/F | CCT | YYT | CCUAUGAAUU | 636 | (AGAG) | 20 (C1/2) | EQR- |
| | | | CCGAUGAGCC | | | | SpBE3 |
| P1145LVS/F | CCT | YYT | CAGAGGCUGA | 637 | (TCCGAT) | 20 (C12/13) | KKH- |
| | | | ACCUAUGAAU | | | | SaBE3 |
| P1151L/S/F | CCA | YYA | UGAGCCAGAG | 638 | (CAG) | 20 (C5/6) | SpBE3 |
| | | | GCCUGUUUCA | | | | |
| P1151LVS/F | CCA | YYA | GAGCCAGAGG | 639 | (AGAT) | 20 (C4/5) | VQR- |
| | | | CCUGUUUCAC | | | | SpBE3 |
| P1151LVS/F | CCA | YYA | CCAGAGGCCU | 640 | (TGG) | 20 (C1/2) | SpBE3 |
| | | | GUUUCACAGA | | | | |
| P1151LVS/F | CCA | YYA | AUGAGCCAGA | 641 | (ACAGAT) | 20 (C6/7) | KKH- |
| | | | GGCCUGUUUC | | | | SaBE3 |
| P1151LVS/F | CCA | YYA | AGCCAGAGGC | 642 | (GATGGT) | 20 (C3/4) | KKH- |
| | | | CUGUUUCACA | | | | SaBE3 |
| C1154Y | TGT | TAT | AAACAGGCCU | 643 | (GGAA) | 20 (C6) | VQR- |
| | | | CUGGCUCAUC | | | | SpBE3 |
| C1154Y | TGT | TAT | GAAACAGGCC | 644 | (CGG) | 20 (C7) | SpBE3 |
| | | | UCUGGCUCAU | | | | |
| C1154Y | TGT | TAT | CCAUCUGUGA | 645 | (TGG) | 20 (C15) | SpBE3 |
| | | | AACAGGCCUC | | | | |
| C1154Y | TGT | TAT | GAAACAGGCC | 646 | (CGGAAT) | 20 (C7) | SaBE3 |
| | | | UCUGGCUCAU | | | | |
| C1159Y | TGT | TAT | CAUACACAAC | 647 | (AGAC) | 20 (C7) | VQR- |
| | | | CUGACAAGAA | | | | SpBE3 |
| C1159Y | TGT | TAT | CCAUACACAA | 648 | (AAG) | 20 (C8) | SpBE3 |
| | | | CCUGACAAGA | | | | |
| C1159Y | TGT | TAT | CCUCCAUACA | 649 | (AGAA) | 20 (C11) | VQR- |
| | | | CAACCUGACA | | | | SpBE3 |
| C1159Y | TGT | TAT | ACCUCCAUAC | 650 | (AAG) | 20 (C12) | SpBE3 |
| | | | ACAACCUGAC | | | | |
| C1159Y | TGT | TAT | AACCUCCAUA | 651 | (CAAGAAA) | 20 (C13) | St1BE3 |
| | | | CACAACCUGA | | | | |
| P1285LVS/F | CCC | YYC | UUGGCCCCAU | 652 | (CGG) | 20 (C6/7) | SpBE3 |
| | | | UAAAUCCCUU | | | | |
| P1285LVS/F | CCC | YYC | UGGCCCCAUU | 653 | (GGAC) | 20 (C5/6) | VQR- |
| | | | AAAUCCCUUC | | | | SpBE3 |
| P1297LVS/F | CCT | YYT | AGACCUCUAA | 654 | (TAG) | 20 (C4/5) | SpBE3 |
| | | | GAGCCUUAUC | | | | |
| P1297LVS/F | CCT | YYT | UACCUCUAAG | 655 | (AGAT) | 20 (C3/4) | VOR- |
| | | | AGCCUUAUCU | | | | SpBE3 |
| P1297LVS/F | CCT | YYT | AAGACCUCUA | 656 | (CTAGAT) | 20 (C5/6) | KKH- |
| | | | AGAGCCUUAU | | | | SaBE3 |
| P1319LVS/F | CCT | YYT | AGGAGCAAUU | 657 | (TGAA) | 20 (C11/12) | VQR- |
| | | | CCUUCCAUCA | | | | SpBE3 |
| P1319LVS/F | CCT | YYT | GCAAUUCCUU | 658 | (TGTG) | 20 (C7/8) | VQR- |
| | | | CCAUCAUGAA | | | | SpBE3 |
| P1319LVS/F | CCT | YYT | UAGGAGCAAU | 659 | (ATGAAT) | 20 (C12/13) | SaBE3 |
| | | | UCCUUCCAUC | | | | |
| C1328Y | TGT | TAT | ACACACAAGU | 660 | (TGAT) | 20 (C4) | VQR- |
| | | | AGCACAUUCA | | | | SpBE3 |
| C1328Y | TGT | TAT | AGACACACAA | 661 | (CATGAT) | 20 (C6) | KKH- |
| | | | GUAGCACAUU | | | | SaBE3 |
| G1339R | GGA | ARA | CCAUGAUGCU | 662 | (CAG) | 20 (C-1) | SpBE3 |
| | | | GAAUAUCAGC | | | | |
| G1339R | GGA | ARA | ACUCCCAUGA | 663 | (CAG) | 20 (C4) | SpBE3 |
| | | | UGCUGAAUAU | | | | |
| G1339R | GGA | ARA | CAAAUUUACU | 664 | (TGAA) | 20 (C11) | VQR- |
| | | | CCCAUGAUGC | | | | SpBE3 |
| G1339R | GGA | ARA | CCAUGAUGCU | 665 | (CAGAAT) | 20 (C1) | SaBE3 |
| | | | GAAUAUCAGC | | | | |
| G1339R | GGA | ARA | ACAAAUUUAC | 666 | (CTGAAT) | 20 (C12) | SaBE3 |
| | | | UCCCAUGAUG | | | | |
| G1339R | GGA | ARA | CCCAUGAUGC | 667 | (CCAGAAT) | 20 (C1) | St1BE3 |
| | | | UGAAUAUCAG | | | | |
| C1350Y | TGT | TAT | AAUACACUCA | 668 | (CAG) | 20 (C7) | SpBE3 |
| | | | UAGAACUUGC | | | | |
| P1360LVS/F | CCT | YYT | GUCACGGUUU | 669 | (AAG) | 20 (C11/12) | SpBE3 |
| | | | CCUGCAAGUC | | | | |
| P1360LVS/F | CCT | YYT | GGGUCACGGU | 670 | (TCAAGT) | 20 (C13/14) | KKH- |
| | | | UUCCUGCAAG | | | | SaBE3 |
| P1360LVS/F | CCT | YYT | GGUUUCCUGC | 671 | (CCAAAT) | 20 (C6/7) | KKH- |
| | | | AAGUCAAGUU | | | | SaBE3 |
| P1365LVS/F | CCA | YYA | AGUCAAGUUC | 672 | (CGAA) | 20 (C10/11) | VQR- |
| | | | CAAAUCGUUC | | | | SpBE3 |
| P1365LVS/F | CCA | YYA | AAGUCAAGUU | 673 | (CCGAAT) | 20 (C11/12) | SaBE3 |
| | | | CCAAAUCGUU | | | | |
| C1370Y | TGT | TAT | AUUCGGAACG | 674 | (TGAC) | 20 (C2) | VQR- |
| | | | AUUUGGAACU | | | | SpBE3 |
| C1370V | TGT | TAT | CAAAACAUUC | 675 | (GGAA) | 20 (C8) | VQR- |
| | | | GGAACGAUUU | | | | SpBE3 |
| C1370Y | TGT | TAT | GCAAAACAUU | 676 | (TGG) | 20 (C9) | SpBE3 |
| | | | CGGAACGAUU | | | | |
| C1370Y | TGT | TAT | UAAGGGCAAA | 677 | (CGAT) | 20 (C14) | VQR- |
| | | | ACAUUCGGAA | | | | SpBE3 |
| C1370Y | TGT | TAT | CAUAAGGGCA | 678 | (AACGAT) | 20 (C16) | KKH- |
| | | | AAACAUUCGG | | | | SaBE3 |
| P1425L7S/F | CCC | YYC | GUAGACAAGC | 679 | (TGAA) | 20 (C13/14) | VQR- |
| | | | AGCCCAAAUA | | | | SpBE3 |
| P1425L7S/F | CCC | YYC | AAGCAGCCCA | 680 | (TAG) | 20 (C7/8) | SpBE3 |
| | | | AAUAUGAAUA | | | | |
| G1444R | GGG | ARR | UGACCCAAAG | 681 | (CGAC) | 20 (C5) | VQR- |
| | | | AUGAUAAAGA | | | | SpBE3 |
| G1444R | GGG | ARR | GAAUGACCCA | 682 | (AGAC) | 20 (C8) | VQR- |
| | | | AAGAUGAUAA | | | | SpBE3 |
| G1444R | GGG | ARR | AGAAUGACCC | 683 | (AAG) | 20 (C9) | SpBE3 |
| | | | AAAGAUGAUA | | | | |
| G1444R | GGG | ARR | AGUGAAGAAU | 684 | (TGAT) | 20 (C14) | VQR- |
| | | | GACCCAAAGA | | | | SpBE3 |
| G1444R | GGG | ARR | CCCAAAGAUG | 685 | (CAAAAT) | 20 (C2) | KKH- |
| | | | AUAAAGACGA | | | | SaBE3 |
| S1490F^{b} | TCC | TTY | UGGGGUCCAA | 686 | (AAG) | 20 (C7/8) | SpBE3 |
| | | | GAAGCCACAA | | | | |
| S1490F^{b} | TCC | TTY | GGGUCCAAGA | 687 | (GCCAAT) | 20 (C5/6) | KKH- |
| | | | AGCCACAAAA | | | | SaBE3 |
| P1493/6L/S/ | CCA | YYA | AGCCACAAAA | 688 | (CGAC) | 20 | VQR- |
| F | | | GCCAAUUCCU | | | (C3/4/12) | SpBE3 |
| P1493US/F | CCA | YYA | GGGUCCAAGA | 689 | (GCCAAT) | 20 (C13/14) | KKH- |
| | | | AGCCACAAAA | | | | SaBE3 |
| P1496L7S/F | CCA | YYA | ACAAAAGCCA | 690 | (CAG) | 20 (C8/9) | SpBE3 |
| | | | AUUCUUCGAC | | | | |
| P1496/8L/S/ | CCA | YYA | CAAAAGCCAA | 691 | (AGG) | 20 (C7-14) | SpBE3 |
| F | | | UUCCUCGACC | | | | |
| P1496/8L/S/ | CCA | YYA | AAAAGCCAAU | 692 | (GGG) | 20 (C6-13) | SpBE3 |
| F | | | UCCUCGACCA | | | | |
| P1496/8L/S/ | CCA | YYA | AAAGCCAAUU | 693 | (GGG) | 20 (C5-12) | SpBE3 |
| F | | | CCUCGACCAG | | | | |
| P1496/8L/S/ | CCA | YYA | AAAGCCAAUU | 694 | (GGG) | 20 (C5-12) | SpBE3 |
| F | | | CCUCGACCAG | | | | |
| P1496/8USI | CCA | YYA | CAAAAGCCAA | 695 | (AGGGGT) | 20 (C7-14) | SaBE3 |
| F | | | UUCCUCGACC | | | | |
| P1496L7S/F | CCA | YYA | CAAAAGCCAA | 696 | (AGGGG) | 20 (C7-14) | St3BE3 |
| | | | UUCCUCGACC | | | | |
| P1498/1500 | CCT | YYT | AAUUCCUCGA | 697 | (AAAAAT) | 20 (C5-12) | KKH- |
| L/S/F | | | CCAGGGGUAA | | | | SaBE3 |
| P1500L7S/F | CCA | YYA | AAUUCCUCGA | 698 | (AAAAAT) | 20 (C11/12) | KKH- |
| | | | CCAGGGGUAA | | | | SaBE3 |
| C1526Y | TGT | TAT | GUUGAGACAG | 699 | (TGAT) | 20 (C8) | VQR- |
| | | | AUAAGAACCA | | | | SpBE3 |
| C1526Y | TGT | TAT | UUACCAUGUU | 700 | (AGAA) | 20 (C15) | VQR- |
| | | | GAGACAGAUA | | | | SpBE3 |
| C1526Y | TGT | TAT | GUUACCAUGU | 701 | (AAG) | 20 (C16) | SpBE3 |
| | | | UGAGACAGAU | | | | |
| C1526Y | TGT | TAT | AGACAGAUAA | 702 | (ACTAAT) | 20 (C4) | KKH- |
| | | | GAACCAUGAU | | | | SaBE3 |
| C1526Y | TGT | TAT | AUGUUGAGAC | 703 | (CATGAT) | 20 (C10) | KKH- |
| | | | AGAUAAGAAC | | | | SaBE3 |
| C1526Y | TGT | TAT | GGUUACCAUG | 704 | (TAAGAAC) | 20 (C17) | St1BE3 |
| | | | UUGAGACAGA | | | | |
| G1560R | GGA | ARA | CACACAUUCU | 705 | (GGAT) | 20 (C11) | VQR- |
| | | | CCAGUGAAAA | | | | SpBE3 |
| G1560R | GGA | ARA | GCACACAUUC | 706 | (AGG) | 20 (C12) | SpBE3 |
| | | | UCCAGUGAAA | | | | |
| G1560R | GGA | ARA | AGCACACAUU | 707 | (AAG) | 20 (C13) | SpBE3 |
| | | | CUCCAGUGAA | | | | |
| G1560R | GGA | ARA | AGCACACAUU | 708 | (AAGGAT) | 20 (C13) | SaBE3 |
| | | | CUCCAGUGAA | | | | |
| C1562Y | TGT | TAT | CACACAUUCU | 709 | (GGAT) | 20 (C5) | VQR- |
| | | | CCAGUGAAAA | | | | SpBE3 |
| C1562Y | TGT | TAT | GCACACAUUC | 710 | (AGG) | 20 (C6) | SpBE3 |
| | | | UCCAGUGAAA | | | | |
| C1562Y | TGT | TAT | AGCACACAUU | 711 | (AAG) | 20 (C7) | SpBE3 |
| | | | CUCCAGUGAA | | | | |
| C1562Y | TGT | TAT | UUUUAGCACA | 712 | (TGAA) | 20 (C11) | VQR- |
| | | | CAUUCUCCAG | | | | SpBE3 |
| C1562Y | TGT | TAT | AGUUUUAGCA | 713 | (AGTG) | 20 (C13) | VQR- |
| | | | CACAUUCUCC | | | | SpBE3 |
| C1562Y | TGT | TAT | CAGUUUUAGC | 714 | (CAG) | 20 (C14) | SpBE3 |
| | | | ACACAUUCUC | | | | |
| C1562Y | TGT | TAT | AGCACACAUU | 715 | (AAGGAT) | 20 (CT) | SaBE3 |
| | | | CUCCAGUGAA | | | | |
| C1562Y | TGT | TAT | AUCAGUUUUA | 716 | (TCCAGT) | 20 (C16) | KKH- |
| | | | GCACACAUUC | | | | SaBE3 |
| G1577R | GGA | ARA | CCAUCCUACA | 717 | (AGTG) | 20 (C5) | VQR- |
| | | | GUGAAGUAGU | | | | SpBE3 |
| G1577R | GGA | ARA | UCCAUCCUAC | 718 | (TAG) | 20 (C6) | SpBE3 |
| | | | AGUGAAGUAG | | | | |
| G1577R | GGA | ARA | UAUUCCAUCC | 719 | (TAG) | 20 (C9) | SpBE3 |
| | | | UACAGUGAAG | | | | |
| G1577R | GGA | ARA | AAAUAUUCCA | 720 | (AAG) | 20 (C12) | SpBE3 |
| | | | UCCUACAGUG | | | | |
| G1577R | GGA | ARA | AAAAAUAUUC | 721 | (TGAA) | 20 (C14) | VQR- |
| | | | CAUCCUACAG | | | | SpBE3 |
| G1577R | GGA | ARA | AUUCCAUCCU | 722 | (AGTAGT) | 20 (C8) | KKH- |
| | | | ACAGUGAAGU | | | | SaBE3 |
| G1577R | GGA | ARA | AAUAUUCCAU | 723 | (AGTAGT) | 20 (C11) | KKH- |
| | | | CCUACAGUGA | | | | SaBE3 |
| G1577R | GGA | ARA | AAAAAUAUUC | 724 | (TGAAGT) | 20 (C14) | KKH- |
| | | | CAUCCUACAG | | | | SaBE3 |
| P1606L7S/F | CCT | YYT | UUGUGUCCCC | 725 | (CGAG) | 20 (C9/10) | EQR- |
| | | | UACCCUGUUC | | | | SpBE3 |
| P1606LVS/F | CCT | YYT | UGUGUCCCCU | 726 | (GAG) | 20 (C8/9) | SpBE3 |
| | | | ACCCUGUUCC | | | | |
| P1606L7S/F | CCT | YYT | GUGUCCCCUA | 727 | (AGTG) | 20 (C7/8) | VQR- |
| | | | CCCUGUUCCG | | | | SpBE3 |
| P1606LVS/F | CCT | YYT | GUCCCCUACC | 728 | (TGAT) | 20 (C5/6) | VQR- |
| | | | CUGUUCCGAG | | | | SpBE3 |
| P1606LVS/F | CCT | YYT | UUUGUGUCCC | 729 | (CCGAGT) | 20 (C10/11) | SaBE3 |
| | | | CUACCCUGUU | | | | |
| P1606LVS/F | CCT | YYT | GUGUCCCCUA | 730 | (AGTGAT) | 20 (C7/8) | KKH- |
| | | | CCCUGUUCCG | | | | SaBE3 |
| G1626R | GGA | ARA | CUUUGACUAG | 731 | (CGG) | 20 (C-1) | SpBE3 |
| | | | ACGUAGGAUU | | | | |
| G1626R | GGA | ARA | UGCUCCUUUG | 732 | (GGAT) | 20 (C5) | VQR- |
| | | | ACUAGACGUA | | | | SpBE3 |
| G1626R | GGA | ARA | UUGCUCCUUU | 733 | (AGG) | 20 (C6) | SpBE3 |
| | | | GACUAGACGU | | | | |
| G1626R | GGA | ARA | UUUGCUCCUU | 734 | (TAG) | 20 (CT) | SpBE3 |
| | | | UGACUAGACG | | | | |
| G1626R | GGA | ARA | UCCCCUUUGC | 735 | (AGAC) | 20 (C12) | VQR- |
| | | | UCCUUUGACU | | | | SpBE3 |
| G1626R | GGA | ARA | AUCCCCUUUG | 736 | (TAG) | 20 (C13) | SpBE3 |
| | | | CUCCUUUGAC | | | | |
| G1626R | GGA | ARA | UUUGCUCCUU | 737 | (TAGGAT) | 20 (CT) | SaBE3 |
| | | | UGACUAGACG | | | | |
| G1629R | GGG | ARR | UCCCCUUUGC | 738 | (AGAC) | 20 (C3) | VQR- |
| | | | UCCUUUGACU | | | | SpBE3 |
| G1629R | GGG | ARR | AUCCCCUUUG | 739 | (TAG) | 20 (C4) | SpBE3 |
| | | | CUCCUUUGAC | | | | |
| G1629R | GGG | ARR | GCGGAUCCCC | 740 | (TGAC) | 20 (C8) | VQR- |
| | | | UUUGCUCCUU | | | | SpBE3 |
| P1642LVS/F | CCT | YYT | CUUCCUGCGU | 741 | (CGG) | 20 (C4/5) | SpBE3 |
| | | | UGUUUAACAU | | | | |
| G1662R | GGA | ARA | CAUUCCAAAG | 742 | (TGAA) | 20 (C5) | VQR- |
| | | | AUGGCGUAGA | | | | SpBE3 |
| G1662R | GGA | ARA | GGACAUUCCA | 743 | (AGAT) | 20 (C8) | VQR- |
| | | | AAGAUGGCGU | | | | SpBE3 |
| G1662R | GGA | ARA | UGGACAUUCC | 744 | (TAG) | 20 (C9) | SpBE3 |
| | | | AAAGAUGGCG | | | | |
| G1662R | GGA | ARA | AAGUUGGACA | 745 | (GGCG) | 20 (C13) | VRER- |
| | | | UUCCAAAGAU | | | | SpBE3 |
| G1662R | GGA | ARA | UUGGACAUUC | 746 | (GTAGAT) | 20 (C10) | KKH- |
| | | | CAAAGAUGGC | | | | SaBE3 |
| G1662R | GGA | ARA | AAAGUUGGAC | 747 | (TGGCG) | 20 (C14) | St3BE3 |
| | | | AUUCCAAAGA | | | | |
| C1690Y | TGC | TAC | GCAAAUCAUA | 748 | (AGG) | 20 (C2) | SpBE3 |
| | | | CUGUUGCCAA | | | | |
| C1690Y | TGC | TAC | GGCAAAUCAU | 749 | (AAG) | 20 (C3) | SpBE3 |
| | | | ACUGUUGCCA | | | | |
| C1690Y | TGC | TAC | AGGCAAAUCA | 750 | (AAAGGT) | 20 (C4) | KKH- |
| | | | UACUGUUGCC | | | | SaBE3 |
| P1706LVS/F | CCT | YYT | UUGCUAGCAC | 751 | (CAG) | 20 (C10/11) | SpBE3 |
| | | | CUAUUCUUAA | | | | |
| P1706LVS/F | CCT | YYT | UAGCACCUAU | 752 | (AAG) | 20 (C6/7) | SpBE3 |
| | | | UCUUAACAGU | | | | |
| P1706L7S/F | CCT | YYT | GAUUGCUAGC | 753 | (AACAGT) | 20 (C12/13) | KKH- |
| | | | ACCUAUUCUU | | | | SaBE3 |
| P1712LVS/F | CCA | YYA | UUAACAGUAA | 754 | (TGTG) | 20 (C12-14) | VQR- |
| | | | GCCACCCGAC | | | | SpBE3 |
| P1712L7S/F | CCA | YYA | AACAGUAAGC | 755 | (TGAC) | 20 (C10/11) | VQR- |
| | | | CACCCGACUG | | | | SpBE3 |
| P1712/3L/S/ | CCA | YYA | CCACCCGACU | 756 | (AAAAGT) | 20 (C1-5) | KKH- |
| F | | | GUGACCCAAA | | | | SaBE3 |
| P1713L/S/F | CCC | YYC | ACCCGACUGU | 757 | (AAG) | 20 (C2/3) | SpBE3 |
| | | | GACCCAAAAA | | | | |
| C1715Y | TGT | TAT | AGUCGGGUGG | 758 | (AGAA) | 20 (C-1) | VQR- |
| | | | CUUACUGUUA | | | | SpBE3 |
| C1715Y | TGT | TAT | CAGUCGGGUG | 759 | (AAG) | 20 (C1) | SpBE3 |
| | | | GCUUACUGUU | | | | |
| C1715Y | TGT | TAT | UUUUUUGGGU | 760 | (TGG) | 20 (C13) | SpBE3 |
| | | | CACAGUCGGG | | | | |
| C1715Y | TGT | TAT | CUUUUUUUGG | 761 | (GGTG) | 20 (C15) | VQR- |
| | | | GUCACAGUCG | | | | SpBE3 |
| C1715Y | TGT | TAT | ACUUUUUUUG | 762 | (GGG) | 20 (C16) | SpBE3 |
| | | | GGUCACAGUC | | | | |
| C1715Y | TGT | TAT | CAGUCGGGUG | 763 | (AAGAAT) | 20 (C1) | SaBE3 |
| | | | GCUUACUGUU | | | | |
| C1715Y | TGT | TAT | GAACUUUUUU | 764 | (TCGGGT) | 20 (C18) | SaBE3 |
| | | | UGGGUCACAG | | | | |
| C1715Y | TGT | TAT | ACAGUCGGGU | 765 | (TAAGAAT) | 20 (C2) | St1BE3 |
| | | | GGCUUACUGU | | | | |
| C1715Y | TGT | TAT | ACUUUUUUUG | 766 | (GGGTG) | 20 (C16) | St3BE3 |
| | | | GGUCACAGUC | | | | |
| P1717L/S/F | CCA | YYA | GACCCAAAAA | 767 | (TGG) | 20 (C4/5) | SpBE3 |
| | | | AAGUUCAUCC | | | | |
| P1717US/F | CCA | YYA | ACCCAAAAAA | 768 | (GGAA) | 20 (C3/4) | VQR- |
| | | | AGUUCAUCCU | | | | SpBE3 |
| P1717L7S/F | CCA | YYA | CCAAAAAAAG | 769 | (AAG) | 20 (C1/2) | SpBE3 |
| | | | UUCAUCCUGG | | | | |
| P1717L/S/F | CCA | YYA | ACCCAAAAAA | 770 | (GGAAGT) | 20 (C3/4) | KKH- |
| | | | AGUUCAUCCU | | | | SaBE3 |
| P1722L/S/F | CCT | YYT | AAAAGUUCAU | 771 | (CAG) | 20 (C11/12) | SpBE3 |
| | | | CCUGGAAGUU | | | | |
| P1722L/S/F | CCT | YYT | GUUCAUCCUG | 772 | (TGAA) | 20 (C7/8) | VQR- |
| | | | GAAGUUCAGU | | | | SpBE3 |
| P1722L7S/F | CCT | YYT | UCAUCCUGGA | 773 | (AAG) | 20 (C5/6) | SpBE3 |
| | | | AGUUCAGUUG | | | | |
| P1722L7S/F | CCT | YYT | CAUCCUGGAA | 774 | (AGG) | 20 (C4/5) | SpBE3 |
| | | | GUUCAGUUGA | | | | |
| P1722US/F | CCT | YYT | AUCCUGGAAG | 775 | (GGAG) | 20 (C3/4) | EQR- |
| | | | UUCAGUUGAA | | | | SpBE3 |
| P1722L7S/F | CCT | YYT | UCCUGGAAGU | 776 | (GAG) | 20 (C2/3) | SpBE3 |
| | | | UCAGUUGAAG | | | | |
| P1722L7S/F | CCT | YYT | CCUGCAAGUU | 777 | (ACAC) | 20 (C1/2) | VQR- |
| | | | CACUUCAAGC | | | | SpBE3 |
| P1722L/S/F | CCT | YYT | AAAAAAGUUC | 778 | (TTCAGT) | 20 (C13/14) | KKH- |
| | | | AUCCUGGAAG | | | | SaBE3 |
| P1722L/S/F | CCT | YYT | CAUCCUGGAA | 779 | (AGGAG) | 20 (C4/5) | St3BE3 |
| | | | GUUCAGUUGA | | | | |
| C1730Y | TGT | TAT | UUACCACAGU | 780 | (TGAA) | 20 (C7) | VQR- |
| | | | CUCCUUCAAC | | | | SpBE3 |
| P1733LVS/F | CCA | YYA | GACUGUGGUA | 781 | (TGG) | 20 (C13/14) | SpBE3 |
| | | | ACCCAUCUGU | | | | |
| P1733L/S/F | CCA | YYA | ACUGUGGUAA | 782 | (GGAA) | 20 (C12/13) | VQR- |
| | | | CCCAUCUGUU | | | | SpBE3 |
| P1733L/S/F | CCA | YYA | GACUGUGGUA | 783 | (TGGAAT) | 20 (C13/14) | SaBE3 |
| | | | ACCCAUCUGU | | | | |
| G1736R | GGA | ARA | UUCCAACAGA | 784 | (CAG) | 20 (C3) | SpBE3 |
| | | | UGGGUUACCA | | | | |
| G1736R | GGA | ARA | AGUAGAAUAU | 785 | (GGG) | 20 (C12) | SpBE3 |
| | | | UCCAACAGAU | | | | |
| G1736R | GGA | ARA | AAGUAGAAUA | 786 | (TGG) | 20 (C13) | SpBE3 |
| | | | UUCCAACAGA | | | | |
| G1736R | GGA | ARA | UAUUCCAACA | 787 | (CACAGT) | 20 (C5) | KKH- |
| | | | GAUGGGUUAC | | | | SaBE3 |
| G1736R | GGA | ARA | AAAGUAGAAU | 788 | (ATGGGT) | 20 (C14) | SaBE3 |
| | | | AUUCCAACAG | | | | |
| P1773I7S/F | CCT | YYT | GAAAGUACUG | 789 | (TGAG) | 20 (C13/14) | EQR- |
| | | | AACCUCUGAG | | | | SpBE3 |
| P1773L7S/F | CCT | YYT | AAAGUACUGA | 790 | (GAG) | 20 (C12/13) | SpBE3 |
| | | | ACCUCUGAGU | | | | |
| P1773LVS/F | CCT | YYT | AAGUACUGAA | 791 | (AGG) | 20 (C11/12) | SpBE3 |
| | | | CCUCUGAGUG | | | | |
| P1773L/S/F | CCT | YYT | AGUACUGAAC | 792 | (GGAT) | 20 (C10/11) | VQR- |
| | | | CUCUGAGUGA | | | | SpBE3 |
| P1773L7S/F | CCT | YYT | ACUGAACCUC | 793 | (TGAC) | 20 (C7/8) | VQR- |
| | | | UGAGUGAGGA | | | | |
| | | | | | | | SpBE3 |
| P1773IVS/F | CCT | YYT | CCUCUGAGUG | 794 | (TGAG) | 20 (C1/2) | EQR- |
| | | | AGGAUGACUU | | | | SpBE3 |
| P1773LVS/F | CCT | YYT | AAAGUACUGA | 795 | (GAGGAT) | 20 (C12/13) | SaBE3 |
| | | | ACCUCUGAGU | | | | |
| P1773LVS/F | CCT | YYT | CCUCUGAGUG | 796 | (TGAGAT) | 20 (C1/2) | KKH- |
| | | | AGGAUGACUU | | | | SaBE3 |
| P1791LVS/F | CCC | YYC | AGUUUGAUCC | 797 | (CAG) | 20 (C9/10) | SpBE3 |
| | | | CGAUGCGACC | | | | |
| P1791LVS/F | CCC | YYC | UCCCGAUGCG | 798 | (TAG) | 20 (C2/3) | SpBE3 |
| | | | ACCCAGUUUA | | | | |
| P1791LVS/F | CCC | YYC | CCCGAUGCGA | 799 | (AGAG) | 20 (C1/2) | EQR- |
| | | | CCCAGUUUAU | | | | SpBE3 |
| P1791LVS/F | CCC | YYC | GAAGUUUGAU | 800 | (CCCAGT) | 20 (C11/12) | KKH- |
| | | | CCCGAUGCGA | | | | SaBE3 |
| P1791LVS/F | CCC | YYC | UCCCGAUGCG | 801 | (TAGAGT) | 20 (C2/3) | SaBE3 |
| | | | ACCCAGUUUA | | | | |
| P1811/2LVS/ | CCT | YYT | CCUGGAUCCU | 802 | (TAG) | 20 (C8-12) | SpBE3 |
| F | | | CCUCUUCUCA | | | | |
| P1818LVS/F | CCC | YYC | UCUCAUAGCA | 803 | (AAG) | 20 (C14/15) | SpBE3 |
| | | | AAACCCAACA | | | | |
| P1818LVS/F | CCC | YYC | UAGCAAAACC | 804 | (CAG) | 20 (C9/10) | SpBE3 |
| | | | CAACAAAGUC | | | | |
| P1818LVS/F | CCC | YYC | CUUCUCAUAG | 805 | (CAAAGT) | 20 (C16/17) | KKH- |
| | | | CAAAACCCAA | | | | SaBE3 |
| P1829LVS/F | CCC | YYC | GCCAUGGAUC | 806 | (TAG) | 20 (C13/14) | SpBE3 |
| | | | UGCCCAUGGU | | | | |
| P1829LVS/F | CCC | YYC | CCAUGGAUCU | 807 | (AGTG) | 20 (C12/13) | VQR- |
| | | | GCCCAUGGUU | | | | SpBE3 |
| P1829LVS/F | CCC | YYC | AUGGAUCUGC | 808 | (TGG) | 20 (C10/11) | SpBE3 |
| | | | CCAUGGUUAG | | | | |
| P1829IVS/F | CCC | YYC | UGGAUCUGCC | 809 | (GGTG) | 20 (C9/10) | VQR- |
| | | | CAUGGUUAGU | | | | SpBE3 |
| P1829LVS/F | CCC | YYC | GAUCUGCCCA | 810 | (TGAC) | 20 (C7/8) | VQR- |
| | | | UGGUUAGUGG | | | | SpBE3 |
| P1829LVS/F | CCC | YYC | UGCCCAUGGU | 811 | (CGG) | 20 (C3/4) | SpBE3 |
| | | | UAGUGGUGAC | | | | |
| P1829LVS/F | CCC | YYC | GCCCAUGGUU | 812 | (GGAT) | 20 (C2/3) | VQR- |
| | | | AGUGGUGACC | | | | SpBE3 |
| P1829LVS/F | CCC | YYC | UUGCCAUGGA | 813 | (GTTAGT) | 20 (C15/16) | KKH- |
| | | | UCUGCCCAUG | | | | SaBE3 |
| P1829LVS/F | CCC | YYC | CCAUGGAUCU | 814 | (AGTGGT) | 20 (C12/13) | KKH- |
| | | | GCCCAUGGUU | | | | SaBE3 |
| P1829LVS/F | CCC | YYC | CUGCCCAUGG | 815 | (CCGGAT) | 20 (C4/5) | SaBE3 |
| | | | UUAGUGGUGA | | | | |
| P1829LVS/F | CCC | YYC | AUGGAUCUGC | 816 | (TGGTG) | 20 (C10/11) | St3BE3 |
| | | | CCAUGGUUAG | | | | |
| P1872LVS/F | CCT | YYT | AUGUCUGCAA | 817 | (AGTG) | 20 (C13/14) | VQR- |
| | | | AUCCUUCCAA | | | | SpBE3 |
| P1872LVS/F | CCT | YYT | AAUCCUUCCA | 818 | (TGAA) | 20 (C4/5) | VQR- |
| | | | AAGUGUCCUA | | | | SpBE3 |
| P1872LVS/F | CCT | YYT | UUCAUGUCUG | 819 | (CAAAGT) | 20 (C16/17) | KKH- |
| | | | CAAAUCCUUC | | | | SaBE3 |
| P1943LVS/F | CCA | YYA | GAACUCAAGU | 820 | (CAG) | 20 (C11/12) | SpBE3 |
| | | | CCAGAAAAAA | | | | |
| P1943LVS/F | CCA | YYA | AACUCAAGUC | 821 | (AGAT) | 20 (C10/11) | VQR- |
| | | | CAGAAAAAAC | | | | SpBE3 |
| P1943LVS/F | CCA | YYA | AGAACUCAAG | 822 | (ACAGAT) | 20 (C12/13) | KKH- |
| | | | UCCAGAAAAA | | | | SaBE3 |
| P1955LVS/F | CCA | YYA | CCACCACCUC | 823 | (TATGAT) | 20 (C12/13) | KKH- |
| | | | UCCACCUUCA | | | | SaBE3 |
| P1955/6L/S/ | CCA | YYA | ACCACCUCUC | 824 | (TGAT) | 20 (C10-14) | VQR- |
| F | | | CACCUUCAUA | | | | SpBE3 |
| P1955/6LVS/ | CCA | YYA | ACCUCUCCAC | 825 | (TAG) | 20 (C7-11) | SpBE3 |
| F | | | CUUCAUAUGA | | | | |
| P1955/6LVS/ | CCA | YYA | CCUCUCCACC | 826 | (AGTG) | 20 (C6-10) | VQR- |
| F | | | UUCAUAUGAU | | | | SpBE3 |
| P1955/6L/S/ | CCA | YYA | CCACCUCUCC | 827 | (GATAGT) | 20 (C9-13) | KKH- |
| F | | | ACCUUCAUAU | | | | SaBE3 |
| P1964LVS/F | CCA | YYA | AGUGUAACAA | 828 | (AGAG) | 20 (C13/14) | EQR- |
| | | | AGCCAGACAA | | | | SpBE3 |
| P1964LVS/F | CCA | YYA | GUGUAACAAA | 829 | (GAG) | 20 (C12/13) | SpBE3 |
| | | | GCCAGACAAA | | | | |
| P1964LVS/F | CCA | YYA | UGUAACAAAG | 830 | (AGAA) | 20 (C11/12) | VQR- |
| | | | CCAGACAAAG | | | | SpBE3 |
| P1964LVS/F | CCA | YYA | AAGCCAGACA | 831 | (TGAA) | 20 (C4/5) | VQR- |
| | | | AAGAGAAAUA | | | | SpBE3 |
| P1964LVS/F | CCA | YYA | UGUAACAAAG | 832 | (AGAAAT) | 20 (C11/12) | KKH- |
| | | | CCAGACAAAG | | | | SaBE3 |
| P1964LVS/F | CCA | YYA | AGUGUAACAA | 833 | (AGAGAAA) | 20 (C13/14) | St1BE3 |
| | | | AGCCAGACAA | | | | |

^{a}BE types: SpBE3 = APOBEC1-SpCas9n-UGI; VQR-SpBE3 = APOBEC1-VQR-SpCas9n-UGI: EQR-SpBE3 = APOBEC1-EQR-SpCas9n-UGI; VRER-SpBE3 = APOBEC1-VRER-SpCas9n-UGI; SaBE3 = APOBEC1-SaCas9n-UGI; KKH-SaBE3 = APOBEC1-KKH-SaCas9n-UGI; St3BE3 = APOBEC1-St3Cas9n-UGI; St1BE3 = APOBEC1-St1Cas9n-UGI.
^{b}Phospho-serine site S1490.

[0102] In some embodiments, editing of an ion channel-encoding nucleotide results in a destabilized or misfolded ion channel protein. An ion channel mutant comprising one or more destabilizing mutations described herein may have reduced activity compared to the wild type ion channel protein. For example, the activity of an ion channel variant comprising one or more destabilizing mutations described herein may be reduced by at least about 20%, at least about 30%, at least about 40%, at least about 50%, at least about 60%, at least about 70%, at least about 80%, at least about 90%, at least about 95%, at least about 99%, or more.

### Premature Stop Codons

[0103] Some aspects of the present disclosure provide strategies of editing an ion channel gene (e.g., SCN9A gene) to reduce the amount of full-length, functional ion channel protein (e.g., NaV1.7 protein) being produced. In some embodiments, stop codons may be introduced into the coding sequence of an ion channel gene upstream of the normal stop codon (referred to as a “premature stop codon”). Premature stop codons cause premature translation termination, in turn resulting in truncated and nonfunctional proteins and induces rapid degradation of the mRNA via the non-sense mediated mRNA decay pathway. See, e.g., Baker et al., Current Opinion in Cell Biology 16 (3): 293-299, 2004; Chang et al., Annual Review of Biochemistry 76: 51-74, 2007; and Behm-Ansmant et al., Genes & Development 20 (4): 391-398, 2006, each of which is incorporated herein by reference.

[0104] The nucleobase editors may be used to convert several amino acid codons to a stop codon (e.g., TAA, TAG, or TGA). For example, nucleobase editors including a cytosine deaminase domain are capable of converting a cytosine (C) base to a thymine (T) base via deamination. Thus, it is envisioned that, for amino acid codons containing a C base, the C base may be converted to T. For example, a CAG (Gln/Q) codon may be changed to a TAG (amber) codon via the deamination of the first C on the coding strand. For sense codons that contain a guanine (G) base, a C base is present on the complementary strand; and the G base may be converted to an adenosine (A) via the deamination of the C on the complementary strand. For example, a TGG (Trp/W) codon may be converted to a TAG (amber) codon via the deamination of the second C on the complementary strand. In some embodiments, two C to T changes are required to convert a codon to a nonsense codon. For example, a CGG (R) codon is converted to a TAG (amber) codon via the deamination of the first C on the coding strand and the deamination of the second C on the complementary strand. Non-limiting examples of codons that may be changed to stop codons via base editing are provided in Table 3.

TABLE 3
Conversion to Stop Codon

| Target codon | Base-editing process | Edited codon |
|---|---|---|
| CAG (Gln/Q) | 1^{st} base C to T on coding strand | TAG (amber) |
| TGG (Trp/W) | 2^{nd} base C to T on complementary strand | TAG (amber) |
| CGA (Arg/R) | 1^{st} base C to T on coding strand | TGA (opal) |
| CAA (Gln/Q) | 1^{st} base C to T on coding strand | TAA (ochre) |
| TGG (Trp/W) | 3^{rd} base C to T on complementary strand | TGA (opal) |
| CGG (Arg/R) | 1^{st} base C to T on coding strand and 2^{nd} base C to T | TAG (amber) |
| | on complementary strand | |
| CGA (Arg/R) | 1^{st} base C to T on coding strand and 2^{nd} base C to T | TAA (orchre) |
| | on complementary strand | |

* single underline: changes on the coding strand
double underline: changes on the complementary strand

[0105] Non-limiting examples of codons in the SCN9A gene that may be changed to stop codons by the nucleobase editor are provided in Table 4. In some embodiments, the introduction of stop codons may be efficacious in generating truncations when the target residue is located in a flexible loop. In some embodiments, two codons adjacent to each other may both be converted to stop codons, resulting in two stop codons adjacent to each other (also referred to as “tandem stop codons”). “Adjacent” means there are no more than 5 amino acids between the two stop codons. For example, the two stop codons may be immediately adjacent to each other (0 amino acids in between) or have 1, 2, 3, 4, or 5 amino acids in between. Non-limiting examples of tandem stop codons that may be introduced are listed in Table 4 (e.g., Q368X/Q369X, Q408X/Q410X, Q1539X/Q1541X, wherein X is a stop codon). In some embodiments, a stop codon is introduced adjacent to a structurally destabilizing mutation.

TABLE 4
Exemplary NaV1.7 (SNA9A) Protective Loss-of-Function Mutations via
Premature Stop Codons

| | | | | | | gRNA | |
|---|---|---|---|---|---|---|---|
| | | | | SEQ | | size | |
| Residue | Codon | Resulting | Programmable guide-RNA | ID | | (C | |
| Change | Change | Codon(s) | sequence | NOs | (PAM) | edited) | BE type^{a} |
| Q18X | CAG | TAG | AAACAGUCUCUUGCCCUCAU | 834 | (TGAA) | 20 (C4) | VQR- |
| | | | | | | | SpBE3 |
| Q25X | CAA | TAA | CUCAUUGAACAACGCAUUGC | 835 | (TGAA) | 20 | VQR- |
| | | | | | | (C10) | SpBE3 |
| Q25X | CAA | TAA | AUUGAACAACGCAUUGCUGA | 836 | (AAG) | 20 (C7) | SpBE3 |
| Q25X | CAA | TAA | UUGAACAACGCAUUGCUGAA | 837 | (AGAA) | 20 (C6) | VQR- |
| | | | | | | | SpBE3 |
| Q25X | CAA | TAA | UGAACAACGCAUUGCUGAAA | 838 | (GAAAAT) | 20 (C5) | KKH- |
| | | | | | | | SaBE3 |
| Q25X | CAA | TAA | CAUUGAACAACGCAUUGCUG | 839 | (AAAGAAA) | 20 (C8) | St1BE3 |
| Q58X | CAG | TAG | AAACAGCUGCCCUUCAUCUA | 840 | (TGG) | 20 (C4) | SpBE3 |
| Q58X | CAG | TAG | AACAGCUGCCCUUCAUCUAU | 841 | (GGG) | 20 (C3) | SpBE3 |
| Q58X | CAG | TAG | ACAGCUGCCCUUCAUCUAUG | 842 | (GGG) | 20 (C2) | SpBE3 |
| Q58X | CAG | TAG | CAGCUGCCCUUCAUCUAUGG | 843 | (GGAC) | 20(C1) | VQR- |
| | | | | | | | SpBE3 |
| Q58X | CAG | TAG | AAACAGCUGCCCUUCAUCUA | 844 | (TGGGG) | 20 (C4) | St3BE3 |
| W151X | TGG | TAR | CCAGUCCGGUGGGUUAUUCA | 845 | (TGG) | 20(C2) | SpBE3 |
| W151X | TGG | TAR | CAUUUUUGGUCCAGUCCGGU | 846 | (GGG) | 20 | SpBE3 |
| | | | | | | (C12) | |
| W151X | TGG | TAR | ACAUUUUUGGUCCAGUCCGG | 847 | (TGG) | 20 | SpBE3 |
| | | | | | | (C13) | |
| W151X | TGG | TAR | GUCCAGUCCGGUGGGUUAUU | 848 | (CATGGT) | 20(C4) | KKH- |
| | | | | | | | SaBE3 |
| W151X | TGG | TAR | GACAUUUUUGGUCCAGUCCG | 849 | (GTGGGT) | 20 | SaBE3 |
| | | | | | | (C14) | |
| W188X | TGG | TAR | CCACGGGUCACGAAGAAAAG | 850 | (TGAA) | 20 (C2) | VQR- |
| | | | | | | | SpBE3 |
| W188X | TGG | TAR | UUCCACGGGUCACGAAGAAA | 851 | (AGTG) | 20(C4) | VQR- |
| | | | | | | | SpBE3 |
| W188X | TGG | TAR | GUUCCACGGGUCACGAAGAA | 852 | (AAG) | 20 (C5) | SpBE3 |
| W188X | TGG | TAR | GCCAGUUCCACGGGUCACGA | 853 | (AGAA) | 20 | VQR- |
| | | | | | | (C9/3) | SpBE3 |
| W188X | TGG | TAR | AGCCAGUUCCACGGGUCACG | 854 | (AAG) | 20 | SpBE3 |
| | | | | | | (C10/4) | |
| W188X | TGG | TAR | CCAGCCAGUUCCACGGGUCA | 855 | (CGAA) | 20 | VQR- |
| | | | | | | (C12/6) | SpBE3 |
| W188X | TGG | TAR | UCCACGGGUCACGAAGAAAA | 856 | (GTGAAT) | 20 (C3) | SaBE3 |
| W188X | TGG | TAR | CAGUUCCACGGGUCACGAAG | 857 | (AAAAGT) | 20 | KKH- |
| | | | | | | (C7/1) | SaBE3 |
| W188X | TGG | TAR | CAGCCAGUUCCACGGGUCAC | 858 | (GAAGAAA) | 20 | St1BE3 |
| | | | | | | (C11/5) | |
| W190X | TGG | TAR | CAAAAUCCAGCCAGUUCCAC | 859 | (GGG) | 20 | SpBE3 |
| | | | | | | (C12) | |
| W190X | TGG | TAR | ACAAAAUCCAGCCAGUUCCA | 860 | (CGG) | 20 | SpBE3 |
| | | | | | | (C13) | |
| W190X | TGG | TAR | GACAAAAUCCAGCCAGUUCC | 861 | (ACGGGT) | 20 | SaBE3 |
| | | | | | | (C14) | |
| R214X | CGA | TGA | GUUUCAGCUCUUCGAACUUU | 862 | (CAG) | 20 | SpBE3 |
| | | | | | | (C13) | |
| R214X | CGA | TGA | UUUCAGCUCUUCGAACUUUC | 863 | (AGAG) | 20 | EQR- |
| | | | | | | (C12) | SpBE3 |
| R214X | CGA | TGA | UUCAGCUCUUCGAACUUUCA | 864 | (GAG) | 20 | SpBE3 |
| | | | | | | (C11) | |
| R214X | CGA | TGA | UCUUCGAACUUUCAGAGUAU | 865 | (TGAG) | 20(C5) | EQR- |
| | | | | | | | SpBE3 |
| R214X | CGA | TGA | CUUCGAACUUUCAGAGUAUU | 866 | (GAG) | 20 (C4) | SpBE3 |
| R214X | CGA | TGA | UUCGAACUUUCAGAGUAUUG | 867 | (AGAG) | 20 (C3) | EQR- |
| | | | | | | | SpBE3 |
| R214X | CGA | TGA | UCGAACUUUCAGAGUAUUGA | 868 | (GAG) | 20 (C2) | SpBE3 |
| R214X | CGA | TGA | GUUUCAGCUCUUCGAACUUU | 869 | (CAGAGT) | 20 | SaBE3 |
| | | | | | | (C13) | |
| Q240X | CAG | TAG | GGGCUUUGAUCCAGUCAGUG | 870 | (AAG) | 20 | SpBE3 |
| | | | | | | (C12) | |
| Q240X | CAG | TAG | GGCUUUGAUCCAGUCAGUGA | 871 | (AGAA) | 20 | VQR- |
| | | | | | | (C11) | SpBE3 |
| 0240X | CAG | TAG | CUUUGAUCCAGUCAGUGAAG | 872 | (AAG) | 20 (C9) | SpBE3 |
| Q240X | CAG | TAG | CAGUCAGUGAAGAAGCUUUC | 873 | (TGAT) | 20 (C1) | VQR- |
| | | | | | | | SpBE3 |
| Q240X | CAG | TAG | UCCAGUCAGUGAAGAAGCUU | 874 | (TCTGAT) | 20 (C3) | KKH- |
| | | | | | | | SaBE3 |
| Q240X | CAG | TAG | GGGGCUUUGAUCCAGUCAGU | 875 | (GAAGAAG) | 20 | St1BE3 |
| | | | | | | (C13) | |
| Q265X | CAG | TAG | AAUUGGACUACAGCUGUUCA | 876 | (TGG) | 20 | SpBE3 |
| | | | | | | (C11) | |
| Q265X | CAG | TAG | AUUGGACUACAGCUGUUCAU | 877 | (GGG) | 20 | SpBE3 |
| | | | | | | (C10) | |
| Q265X | CAG | TAG | UUGGACUACAGCUGUUCAUG | 878 | (GGAA) | 20 (C9) | VQR- |
| | | | | | | | SpBE3 |
| Q265X | CAG | TAG | ACAGCUGUUCAUGGGAAACC | 879 | (TGAA) | 20 (C2) | VQR- |
| | | | | | | | SpBE3 |
| Q265X | CAG | TAG | AGCUGUUCAUGGGAAACCUG | 880 | (AAG) | 20 (C-1) | SpBE3 |
| R277X | CGA | TGA | AAAUGUUUUCGAAAUUCACU | 881 | (TGAA) | 20 | VQR- |
| | | | | | | (C10) | SpBE3 |
| R277X | CGA | TGA | CGAAAUUCACUUGAAAAUAA | 882 | (TGAA) | 20 (C1) | VQR- |
| | | | | | | | SpBE3 |
| R277X | CGA | TGA | AAUGUUUUCGAAAUUCACUU | 883 | (GAAAAT) | 20 (C9) | KKH- |
| | | | | | | | SaBE3 |
| R277X | CGA | TGA | GUUUUCGAAAUUCACUUGAA | 884 | (AATAAT) | 20 (C6) | KKH- |
| | | | | | | | SaBE3 |
| Q323X | CAG | TAG | CUCGUGUGUAGUCAGUGUCC | 885 | (AGAG) | 20 | EQR- |
| | | | | | | (C13) | SpBE3 |
| Q323X | CAG | TAG | UCGUGUGUAGUCAGUGUCCA | 886 | (GAG) | 20 | SpBE3 |
| | | | | | | (C12) | |
| Q323X | CAG | TAG | CGUGUGUAGUCAGUGUCCAG | 887 | (AGG) | 20 | SpBE3 |
| | | | | | | (C11) | |
| Q323X | CAG | TAG | GUGUGUAGUCAGUGUCCAGA | 888 | (GGG) | 20 | SpBE3 |
| | | | | | | (C10) | |
| Q323X | CAG | TAG | UGUGUAGUCAGUGUCCAGAG | 889 | (GGG) | 20 (C9) | SpBE3 |
| Q323X | CAG | TAG | AGUGUCCAGAGGGGUACACC | 890 | (TGTG) | 20 (C-1) | VQR- |
| | | | | | | | SpBE3 |
| Q323X | CAG | TAG | CGUGUGUAGUCAGUGUCCAG | 891 | (AGGGGT) | 20 | SaBE3 |
| | | | | | | (C11) | |
| Q323X | CAG | TAG | CGUGUGUAGUCAGUGUCCAG | 892 | (AGGGG) | 20 | St3BE3 |
| | | | | | | (C11) | |
| W349X | TGG | TAR | CAGCUGAAAGUGUCAAAGCU | 893 | (CGTG) | 20 (C1) | VQR- |
| | | | | | | | SpBE3 |
| W349X | TGG | TAR | AGGCCCAGCUGAAAGUGUCA | 894 | (AAG) | 20 (C6) | SpBE3 |
| W349X | TGG | TAR | GCUAAGAAGGCCCAGCUGAA | 895 | (AGTG) | 20 | VQR- |
| | | | | | | (C13) | SpBE3 |
| W349X | TGG | TAR | AAGGCUAAGAAGGCCCAGCU | 896 | (GAAAGT) | 20 | KKH- |
| | | | | | | (C16) | SaBE3 |
| Q360X | CAA | TAA | GGCUAAUGACCCAAGAUUAC | 897 | (TGG) | 20 | SpBE3 |
| | | | | | | (C12) | |
| Q360X | CAA | TAA | GCUAAUGACCCAAGAUUACU | 898 | (GGG) | 20 | SpBE3 |
| | | | | | | (C11) | |
| Q360X | CAA | TAA | CUAAUGACCCAAGAUUACUG | 899 | (GGAA) | 20 | VQR- |
| | | | | | | (C10) | SpBE3 |
| W363X | TGG | TAR | UCCCAGUAAUCUUGGGUCAU | 900 | (TAG) | 20 (C4) | SpBE3 |
| W363X | TGG | TAR | AAGGUUUUCCCAGUAAUCUU | 901 | (GGG) | 20 | SpBE3 |
| | | | | | | (C11) | |
| W363X | TGG | TAR | AAAGGUUUUCCCAGUAAUCU | 902 | (TGG) | 20 | SpBE3 |
| | | | | | | (C12) | |
| W363X | TGG | TAR | UAAAGGUUUUCCCAGUAAUC | 903 | (TTGGGT) | 20 | SaBE3 |
| | | | | | | (C13) | |
| Q368/9X | CAA | TAA | UUUACCAACAGGUGAGUACC | 904 | (AAG) | 20 (C6) | SpBE3 |
| Q368/9X | CAA | TAA | UUACCAACAGGUGAGUACCA | 905 | (AGAG) | 20 (C5) | EQR- |
| | | | | | | | SpBE3 |
| Q368/9X | CAA | TAA | UACCAACAGGUGAGUACCAA | 906 | (GAG) | 20 (C4) | SpBE3 |
| Q368/9X | CAA | TAA | ACCAACAGGUGAGUACCAAG | 907 | (AGAA) | 20 (C3) | VQR- |
| | | | | | | | SpBE3 |
| Q368/9X | CAA | TAA | UUACCAACAGGUGAGUACCA | 908 | (AGAGAAA) | 20 (C5) | St1BE3 |
| Q369X | CAG | TAG | UUUACCAACAGGUGAGUACC | 909 | (AAG) | 20 (C9) | SpBE3 |
| Q369X | CAG | TAG | UUACCAACAGGUGAGUACCA | 910 | (AGAG) | 20 (C8) | EQR- |
| | | | | | | | SpBE3 |
| Q369X | CAG | TAG | UACCAACAGGUGAGUACCAA | 911 | (GAG) | 20 (C7) | SpBE3 |
| Q369X | CAG | TAG | ACCAACAGGUGAGUACCAAG | 912 | (AGAA) | 20 (C6) | VQR- |
| | | | | | | | SpBE3 |
| Q369X | CAG | TAG | UUACCAACAGGUGAGUACCA | 913 | (AGAGAAA) | 20 (C8) | St1BE3 |
| Q408/10X | CAG | TAG | GAACAGAACCAGGCAAACAU | 914 | (TGAA) | 20 | VQR- |
| | | | | | | (C4/10) | SpBE3 |
| Q408/10X | CAG | TAG | ACAGAACCAGGCAAACAUUG | 915 | (AAG) | 20 | SpBE3 |
| | | | | | | (C2/8) | |
| Q408/10X | CAG | TAG | CAGAACCAGGCAAACAUUGA | 916 | (AGAA) | 20 | VQR- |
| | | | | | | (C1/7) | SpBE3 |
| Q408/10X | CAG | TAG | AACAGAACCAGGCAAACAUU | 917 | (GAAGAAG) | 20 | St1BE3 |
| | | | | | | (C3/9) | |
| Q410X | CAG | TAG | GAACCAGGCAAACAUUGAAG | 918 | (AAG) | 20 (C5) | SpBE3 |
| Q418X | CAG | TAG | AGAAGCUAAACAGAAAGAAU | 919 | (TAG) | 20 | SpBE3 |
| | | | | | | (C11) | |
| Q418X | CAG | TAG | GAAGCUAAACAGAAAGAAUU | 920 | (AGAA) | 20 | VQR- |
| | | | | | | (C10) | SpBE3 |
| Q418X | CAG | TAG | AGAAAGAAUUAGAAUUUCAA | 921 | (CAG) | 20 (C-1) | SpBE3 |
| Q418X | CAG | TAG | AGAAGCUAAACAGAAAGAAU | 922 | (TAGAAT) | 20 | SaBE3 |
| | | | | | | (C11) | |
| Q418X | CAG | TAG | CAGAAAGAAUUAGAAUUUCA | 923 | (ACAGAT) | 20 (C1) | KKH- |
| | | | | | | | SaBE3 |
| Q418X | CAG | TAG | AAGAAGCUAAACAGAAAGAA | 924 | (TTAGAAT) | 20 | St1BE3 |
| | | | | | | (C12) | |
| Q424X | CAA | TAA | AUUAGAAUUUCAACAGAUGU | 925 | (TAG) | 20 | SpBE3 |
| | | | | | | (C11) | |
| Q424X | CAA | TAA | UUAGAAUUUCAACAGAUGUU | 926 | (AGAC) | 20 | VQR- |
| | | | | | | (C10) | SpBE3 |
| Q425X | CAG | TAG | UUAGAAUUUCAACAGAUGUU | 927 | (AGAC) | 20 | VQR- |
| | | | | | | (C13) | SpBE3 |
| Q434X | CAA | TAA | AAAAAAGAGCAAGAAGAAGC | 928 | (TGAG) | 20 | EQR- |
| | | | | | | (C10) | SpBE3 |
| Q434X | CAA | TAA | AAAAAGAGCAAGAAGAAGCU | 929 | (GAG) | 20 (C9) | SpBE3 |
| Q434X | CAA | TAA | AAAAGAGCAAGAAGAAGCUG | 930 | (AGG) | 20 (C8) | SpBE3 |
| Q434X | CAA | TAA | AAAAAAGAGCAAGAAGAAGC | 931 | (TGAGGT) | 20 | KKH- |
| | | | | | | (C10) | SaBE3 |
| Q485X | CAA | TAA | AAGAAUCAAAAGAAGCUCUC | 932 | (CAG) | 20 (C7) | SpBE3 |
| Q485X | CAA | TAA | AGAAUCAAAAGAAGCUCUCC | 933 | (AGTG) | 20 (C6) | VQR- |
| | | | | | | | SpBE3 |
| Q485X | CAA | TAA | AAUCAAAAGAAGCUCUCCAG | 934 | (TGG) | 20 (C4) | SpBE3 |
| Q485X | CAA | TAA | AUCAAAAGAAGCUCUCCAGU | 935 | (GGAG) | 20 (C3) | EQR- |
| | | | | | | | SpBE3 |
| Q485X | CAA | TAA | UCAAAAGAAGCUCUCCAGUG | 936 | (GAG) | 20 (C2) | SpBE3 |
| Q485X | CAA | TAA | CAAAAGAAGCUCUCCAGUGG | 937 | (AGAG) | 20 (C1) | EQR- |
| | | | | | | | SpBE3 |
| Q485X | CAA | TAA | AAAAGAAGCUCUCCAGUGGA | 938 | (GAG) | 20 (C-1) | SpBE3 |
| Q485X | CAA | TAA | AAAAGAAUCAAAAGAAGCUC | 939 | (TCCAGT) | 20 (C9) | KKH- |
| | | | | | | | SaBE3 |
| Q485X | CAA | TAA | AAUCAAAAGAAGCUCUCCAG | 940 | (TGGAG) | 20 (C4) | St3BE3 |
| R523X | CGA | TGA | GAAGGGCAUAGGCGAGCACA | 941 | (TGAA) | 20 | VQR- |
| | | | | | | (C13) | SpBE3 |
| R523X | CGA | TGA | GGCAUAGGCGAGCACAUGAA | 942 | (AAG) | 20 (C9) | SpBE3 |
| R523X | CGA | TGA | GCAUAGGCGAGCACAUGAAA | 943 | (AGAG) | 20 (C8) | EQR- |
| | | | | | | | SpBE3 |
| R523X | CGA | TGA | CAUAGGCGAGCACAUGAAAA | 944 | (GAG) | 20 (C7) | SpBE3 |
| R523X | CGA | TGA | AUAGGCGAGCACAUGAAAAG | 945 | (AGG) | 20 (C6) | SpBE3 |
| R523X | CGA | TGA | GCAUAGGCGAGCACAUGAAA | 946 | (AGAGGT) | 20 (C8) | KKH- |
| | | | | | | | SaBE3 |
| Q534X | CAG | TAG | UACCCCCAAUCAGGUACCAC | 947 | (CCAAAT) | 20 | KKH- |
| | | | | | | (C11) | SaBE3 |
| Q534X | CAG | TAG | AUCAGGUACCACCCAAAUUG | 948 | (CTAAAT) | 20 (C3) | KKH- |
| | | | | | | | SaBE3 |
| R548X | CGA | TGA | UUUUCUGCAAGGCGAAGCAG | 949 | (CAG) | 20 | SpBE3 |
| | | | | | | (C13) | |
| R548X | CGA | TGA | UUUCUGCAAGGCGAAGCAGC | 950 | (AGAA) | 20 | VQR- |
| | | | | | | (C12) | SpBE3 |
| R548X | CGA | TGA | GCAAGGCGAAGCAGCAGAAC | 951 | (AAG) | 20 (C7) | SpBE3 |
| R548X | CGA | TGA | CUGCAAGGCGAAGCAGCAGA | 952 | (ACAAGT) | 20 (C9) | KKH- |
| | | | | | | | SaBE3 |
| R548X | CGA | TGA | GAAGCAGCAGAACAAGUCUU | 953 | (TTTAGT) | 20 (C-1) | KKH- |
| | | | | | | | SaBE3 |
| Q595X | CAG | TAG | GUUUGUGCCCCACAGACCCC | 954 | (AGG) | 20 | SpBE3 |
| | | | | | | (C13) | |
| Q595X | CAG | TAG | UUUGUGCCCCACAGACCCCA | 955 | (GGAG) | 20 | EQR- |
| | | | | | | (C12) | SpBE3 |
| Q595X | CAG | TAG | UUGUGCCCCACAGACCCCAG | 956 | (GAG) | 20 | SpBE3 |
| | | | | | | (C11) | |
| Q595X | CAG | TAG | UGUGCCCCACAGACCCCAGG | 957 | (AGCG) | 20 | VRER- |
| | | | | | | (C10) | SpBE3 |
| Q595X | CAG | TAG | UGCCCCACAGACCCCAGGAG | 958 | (CGAC) | 20 (C8) | VQR- |
| | | | | | | | SpBE3 |
| Q595X | CAG | TAG | CACAGACCCCAGGAGCGACG | 959 | (CAG) | 20 (C3) | SpBE3 |
| Q595X | CAG | TAG | AGACCCCAGGAGCGACGCAG | 960 | (CAG) | 20 (C-1) | SpBE3 |
| Q595X | CAG | TAG | ACAGACCCCAGGAGCGACGC | 961 | (AGCAGT) | 20 (C2) | KKH- |
| | | | | | | | SaBE3 |
| Q595X | CAG | TAG | GUUUGUGCCCCACAGACCCC | 962 | (AGGAG) | 20 | St3BE3 |
| | | | | | | (C13) | |
| R597X | CGA | TGA | AGACCCCAGGAGCGACGCAG | 963 | (CAG) | 20 | SpBE3 |
| | | | | | | (C13) | |
| R597X | CGA | TGA | GAGCGACGCAGCAGUAACAU | 964 | (CAG) | 20 (C4) | SpBE3 |
| Q604X | CAA | TAA | AGUAACAUCAGCCAAGCCAG | 965 | (TAG) | 20 | SpBE3 |
| | | | | | | (C13) | |
| Q604X | CAA | TAA | GUAACAUCAGCCAAGCCAGU | 966 | (AGG) | 20 | SpBE3 |
| | | | | | | (C12) | |
| Q604X | CAA | TAA | CAGUAACAUCAGCCAAGCCA | 967 | (GTAGGT) | 20 | KKH- |
| | | | | | | (C14) | SaBE3 |
| Q604X | CAA | TAA | AGCCAAGCCAGUAGGUCCCC | 968 | (ACCAAT) | 20 (C4) | KKH- |
| | | | | | | | SaBE3 |
| Q643X | CAG | TAG | CCCCAAUGGACAGCUUCUGC | 969 | (CAG) | 20 | SpBE3 |
| | | | | | | (C11) | |
| Q643X | CAG | TAG | CCCAAUGGACAGCUUCUGCC | 970 | (AGAG) | 20 | EQR- |
| | | | | | | (C10) | SpBE3 |
| Q643X | CAG | TAG | CCAAUGGACAGCUUCUGCCA | 971 | (GAG) | 20 (C9) | SpBE3 |
| Q643X | CAG | TAG | CAAUGGACAGCUUCUGCCAG | 972 | (AGG) | 20 (C8) | SpBE3 |
| Q643X | CAG | TAG | AAUGGACAGCUUCUGCCAGA | 973 | (GGTG) | 20 (C7) | VQR- |
| | | | | | | | SpBE3 |
| Q643X | CAG | TAG | UGGACAGCUUCUGCCAGAGG | 974 | (TGAT) | 20 (C5) | VQR- |
| | | | | | | | SpBE3 |
| Q643X | CAG | TAG | CCCAAUGGACAGCUUCUGCC | 975 | (AGAGGT) | 20 | KKH- |
| | | | | | | (C10) | SaBE3 |
| Q643X | CAG | TAG | AAUGGACAGCUUCUGCCAGA | 976 | (GGTGAT) | 20 (C7) | KKH- |
| | | | | | | | SaBE3 |
| Q643X | CAG | TAG | GGACAGCUUCUGCCAGAGGU | 977 | (GATAAT) | 20 (C4) | KKH- |
| | | | | | | | SaBE3 |
| Q643X | CAG | TAG | AGCUUCUGCCAGAGGUGAUA | 978 | (ATAGAT) | 20 (C-1) | KKH- |
| | | | | | | | SaBE3 |
| Q643X | CAG | TAG | CAAUGGACAGCUUCUGCCAG | 979 | (AGGTG) | 20 (C8) | St3BE3 |
| Q663X | CAA | TAA | GCACGACCAAUCAAAUACAC | 980 | (AAG) | 20 (C8) | SpBE3 |
| Q663X | CAA | TAA | CACGACCAAUCAAAUACACA | 981 | (AGAA) | 20 (C7) | VQR- |
| | | | | | | | SpBE3 |
| Q663X | CAA | TAA | ACCAAUCAAAUACACAAGAA | 982 | (AAG) | 20 (C3) | SpBE3 |
| Q663X | CAA | TAA | CCAAUCAAAUACACAAGAAA | 983 | (AGG) | 20 (C2) | SpBE3 |
| Q663X | CAA | TAA | CAAUCAAAUACACAAGAAAA | 984 | (GGCG) | 20 (C1) | VRER- |
| | | | | | | | SpBE3 |
| Q663X | CAA | TAA | GGCACGACCAAUCAAAUACA | 985 | (CAAGAAA) | 20 (C9) | St1BE3 |
| Q663X | CAA | TAA | CCAAUCAAAUACACAAGAAA | 986 | (AGGCG) | 20 (C2) | St3BE3 |
| Q687X | CAG | TAG | CAACCUCAGACAGAGAGCAA | 987 | (TGAG) | 20 (C7) | EQR- |
| | | | | | | | SpBE3 |
| Q687X | CAG | TAG | AACCUCAGACAGAGAGCAAU | 988 | (GAG) | 20 (C6) | SpBE3 |
| Q687X | CAG | TAG | CUCAGACAGAGAGCAAUGAG | 989 | (TAG) | 20 (C3) | SpBE3 |
| Q687X | CAG | TAG | UCAGACAGAGAGCAAUGAGU | 990 | (AGAG) | 20 (C5) | EQR- |
| | | | | | | | SpBE3 |
| Q687X | CAG | TAG | CAGACAGAGAGCAAUGAGUA | 991 | (GAG) | 20 (C1) | SpBE3 |
| Q687X | CAG | TAG | GAUCCCAACCUCAGACAGAG | 992 | (AGCAAT) | 20 | KKH- |
| | | | | | | (C12) | SaBE3 |
| Q687X | CAG | TAG | CCAACCUCAGACAGAGAGCA | 993 | (ATGAGT) | 20 (C8) | SaBE3 |
| Q708X | CAA | TAA | CCAGACAAAAAUGUCCACCU | 994 | (TGG) | 20 (C6) | SpBE3 |
| Q708X | CAA | TAA | CAGACAAAAAUGUCCACCUU | 995 | (GGTG) | 20 (C5) | VQR- |
| | | | | | | | SpBE3 |
| Q708X | CAA | TAA | GACAAAAAUGUCCACCUUGG | 996 | (TGG) | 20 (C3) | SpBE3 |
| | | | | | | 20 (C8) | KKH- |
| Q708X | CAA | TAA | GUCCAGACAAAAAUGUCCAC | 997 | (CTTGGT) | | SaBE3 |
| Q708X | CAA | TAA | CAGACAAAAAUGUCCACCUU | 998 | (GGTGGT) | 20 (C5) | KKH- |
| | | | | | | | SaBE3 |
| Q708X | CAA | TAA | CCAGACAAAAAUGUCCACCU | 999 | (TGGTG) | 20 (C6) | St3BE3 |
| W713X | TGG | TAR | CAAGGUGGACAUUUUUGUCU | 1000 | (GGAC) | 20(C1) | VQR- |
| | | | | | | | SpBE3 |
| W713X | TGG | TAR | CCAAGGUGGACAUUUUUGUC | 1001 | (TGG) | 20(C2) | SpBE3 |
| W714X | TGG | TAR | CAAAUCUGUACCACCAAGGU | 1002 | (GGAC) | 20 | VQR- |
| | | | | | | (C12) | SpBE3 |
| W714X | TGG | TAR | GCAAAUCUGUACCACCAAGG | 1003 | (TGG) | 20 | SpBE3 |
| | | | | | | (C13) | |
| W724X | TGG | TAR | AAUUCCAGAUCAAGAAUUUG | 1004 | (TGTG) | 20 (C6) | VQR- |
| | | | | | | | SpBE3 |
| W724X | TGG | TAR | GCAAUUCCAGAUCAAGAAUU | 1005 | (TGTG) | 20 (C8) | VQR- |
| | | | | | | | SpBE3 |
| W724X | TGG | TAR | UCCAGAUCAAGAAUUUGUGU | 1006 | (GCAAAT) | 20 (C3) | KKH- |
| | | | | | | | SaBE3 |
| W724X | TGG | TAR | UAUGGAGAGCAAUUCCAGAU | 1007 | (CAAGAAT) | 20 | St1BE3 |
| | | | | | | (C16) | |
| W730X | TGG | TAR | CCAAUAUGGAGAGCAAUUCC | 1008 | (AGAT) | 20(C2) | VQR- |
| | | | | | | | SpBE3 |
| W730X | TGG | TAR | UCCAAUAUGGAGAGCAAUUC | 1009 | (CAG) | 20 (C3) | SpBE3 |
| W730X | TGG | TAR | UGAAUUUUAUCCAAUAUGGA | 1010 | (GAG) | 20 | SpBE3 |
| | | | | | | (C12) | |
| W730X | TGG | TAR | UUGAAUUUUAUCCAAUAUGG | 1011 | (AGAG) | 20 | EQR- |
| | | | | | | (C13) | SpBE3 |
| W730X | TGG | TAR | AUCCAAUAUGGAGAGCAAUU | 1012 | (CCAGAT) | 20(C4) | KKH- |
| | | | | | | | SaBE3 |
| W730X | TGG | TAR | GAAUUUUAUCCAAUAUGGAG | 1013 | (AGCAAT) | 20 | KKH- |
| | | | | | | (C11) | SaBE3 |
| Q805X | CAA | TAA | AUGAGUAUUUCCAAGUAGGC | 1014 | (TGG) | 20 | SpBE3 |
| | | | | | | (C12) | |
| Q805X | CAA | TAA | UGAGUAUUUCCAAGUAGGCU | 1015 | (GGAA) | 20 | VQR- |
| | | | | | | (C11) | SpBE3 |
| Q805X | CAA | TAA | CAAGUAGGCUGGAAUAUUUU | 1016 | (TGAC) | 20 (C1) | VQR- |
| | | | | | | | SpBE3 |
| Q805X | CAA | TAA | AUGAGUAUUUCCAAGUAGGC | 1017 | (TGGAAT) | 20 | SaBE3 |
| | | | | | | (C12) | |
| W808X | TGG | TAR | AAAAAUAUUCCAGCCUACUU | 1018 | (GGAA) | 20 | VQR- |
| | | | | | | (C11) | SpBE3 |
| W808X | TGG | TAR | CAAAAAUAUUCCAGCCUACU | 1019 | (TGG) | 20 | SpBE3 |
| | | | | | | (C12) | |
| W808X | TGG | TAR | AAAAAUAUUCCAGCCUACUU | 1020 | (GGAAAT) | 20 | KKH- |
| | | | | | | (C11) | SaBE3 |
| R835X | CGA | TGA | UUGUCAGUUCUGCGAUCAUU | 1021 | (CAG) | 20 | SpBE3 |
| | | | | | | (C13) | |
| R835X | CGA | TGA | UGUCAGUUCUGCGAUCAUUC | 1022 | (AGAC) | 20 | VQR- |
| | | | | | | (C12) | SpBE3 |
| R835X | CGA | TGA | AGUUCUGCGAUCAUUCAGAC | 1023 | (TGG) | 20(C8) | SpBE3 |
| R835X | CGA | TGA | UCAGUUCUGCGAUCAUUCAG | 1024 | (ACTGGT) | 20 | KKH- |
| | | | | | | (C10) | SaBE3 |
| R841X | CGA | TGA | GCUUUUAGCUCCGAGUCUUC | 1025 | (AAG) | 20 | SpBE3 |
| | | | | | | (C12) | |
| R841X | CGA | TGA | UUAGCUCCGAGUCUUCAAGU | 1026 | (TGG) | 20 (C8) | SpBE3 |
| R841X | CGA | TGA | GCUCCGAGUCUUCAAGUUGG | 1027 | (CAAAAT) | 20(C5) | KKH- |
| | | | | | | | SaBE3 |
| W849X | TGG | TAR | CCAGGAUUUUGCCAACUUGA | 1028 | (AGAC) | 20(C2) | VQR- |
| | | | | | | | SpBE3 |
| W849X | TGG | TAR | GCCAGGAUUUUGCCAACUUG | 1029 | (AAG) | 20 (C3) | SpBE3 |
| W849X | TGG | TAR | UGGCCAGGAUUUUGCCAACU | 1030 | (TGAA) | 20 (C5) | VQR- |
| | | | | | | | SpBE3 |
| Q886X | CAG | TAG | GUGGUCGGCAUGCAGCUCUU | 1031 | (TGG) | 20 | SpBE3 |
| | | | | | | (C13) | |
| Q886X | CAG | TAG | UCGGCAUGCAGCUCUUUGGU | 1032 | (AAG) | 20 (C9) | SpBE3 |
| Q886X | CAG | TAG | CGGCAUGCAGCUCUUUGGUA | 1033 | (AGAG) | 20(C8) | EQR- |
| | | | | | | | SpBE3 |
| Q886X | CAG | TAG | GGCAUGCAGCUCUUUGGUAA | 1034 | (GAG) | 20 (C7) | SpBE3 |
| Q886X | CAG | TAG | AGCUCUUUGGUAAGAGCUAC | 1035 | (AAAGAAT) | 20 (C-1) | St1BE3 |
| W908X | TGG | TAR | UGUGCCACCGUGGGAGCGUA | 1036 | (CAG) | 20(C6) | SpBE3 |
| W908X | TGG | TAR | CGUUCAUGUGCCACCGUGGG | 1037 | (AGCG) | 20 | VRER- |
| | | | | | | (C12) | SpBE3 |
| W908X | TGG | TAR | UCGUUCAUGUGCCACCGUGG | 1038 | (GAG) | 20 | SpBE3 |
| | | | | | | (C13) | |
| W908X | TGG | TAR | CAUGUGCCACCGUGGGAGCG | 1039 | (TACAGT) | 20(C8) | KKH- |
| | | | | | | | SaBE3 |
| W908X | TGG | TAR | AGUCGUUCAUGUGCCACCGU | 1040 | (GGGAG) | 20 | St3BE3 |
| | | | | | | (C15) | |
| W928X | TGG | TAR | CCACUCUCCACACAGCACGC | 1041 | (GGAA) | 20 (C2) | VQR- |
| | | | | | | | SpBE3 |
| W928X | TGG | TAR | UCCACUCUCCACACAGCACG | 1042 | (CGG) | 20 (C3) | SpBE3 |
| W928X | TGG | TAR | UAUCCACUCUCCACACAGCA | 1043 | (CGCG) | 20(C5) | VRER- |
| | | | | | | | SpBE3 |
| W928X | TGG | TAR | GUCUCUAUCCACUCUCCACA | 1044 | (CAG) | 20 | SpBE3 |
| | | | | | | (C10) | |
| Q941X | CAA | TAA | GGAGGUCGCUGGUCAAGCUA | 1045 | (TGTG) | 20 | VQR- |
| | | | | | | (C14) | SpBE3 |
| Q989X | CAG | TAG | GCAAACAACCUCCAGAUUGC | 1046 | (AGTG) | 20 | VQR- |
| | | | | | | (C13) | SpBE3 |
| Q989X | CAG | TAG | AAACAACCUCCAGAUUGCAG | 1047 | (TGAC) | 20 | VQR- |
| | | | | | | (C11) | SpBE3 |
| Q989X | CAG | TAG | AACCUCCAGAUUGCAGUGAC | 1048 | (TAG) | 20 (C7) | SpBE3 |
| Q989X | CAG | TAG | ACCUCCAGAUUGCAGUGACU | 1049 | (AGAA) | 20 (C6) | VQR- |
| | | | | | | | SpBE3 |
| Q989X | CAG | TAG | AACCUCCAGAUUGCAGUGAC | 1050 | (TAGAAT) | 20 (C7) | SaBE3 |
| Q989X | CAG | TAG | CAACCUCCAGAUUGCAGUGA | 1051 | (CTAGAAT) | 20 (C8) | St1BE3 |
| Q1004X | CAA | TAA | AUUAUGUGAAACAAACCUUA | 1052 | (CGTG) | 20 | VQR- |
| | | | | | | (C12) | SpBE3 |
| Q1004X | CAA | TAA | UAUGUGAAACAAACCUUACG | 1053 | (TGAA) | 20 | VQR- |
| | | | | | | (C10) | SpBE3 |
| Q1004X | CAA | TAA | UUAUGUGAAACAAACCUUAC | 1054 | (GTGAAT) | 20 | SaBE3 |
| | | | | | | (C11) | |
| Q1026X | CAA | TAA | CAGGGAGAUAAGACAAGCAG | 1055 | (AAG) | 20 | SpBE3 |
| | | | | | | (C14) | |
| Q1026X | CAA | TAA | AGGGAGAUAAGACAAGCAGA | 1056 | (AGAT) | 20 | VQR- |
| | | | | | | (C13) | SpBE3 |
| Q1026X | CAA | TAA | GAUAAGACAAGCAGAAGAUC | 1057 | (TGAA) | 20 (C8) | VQR- |
| | | | | | | | SpBE3 |
| Q1026X | CAA | TAA | AAGCAGAAGAUCUGAAUACU | 1058 | (AAG) | 20 (C-1) | SpBE3 |
| Q1026X | CAA | TAA | AGAUAAGACAAGCAGAAGAU | 1059 | (CTGAAT) | 20 (C9) | SaBE3 |
| Q1077X | CAA | TAA | GUGAUGGUCAAUCAUUUAUU | 1060 | (CACAAT) | 20 (C9) | KKH- |
| | | | | | | | SaBE3 |
| W1161X | TGG | TAR | CAUACACAACCUGACAAGAA | 1061 | (AGAC) | 20 (C1) | VQR- |
| | | | | | | | SpBE3 |
| W1161X | TGG | TAR | CCAUACACAACCUGACAAGA | 1062 | (AAG) | 20(C2) | SpBE3 |
| W1161X | TGG | TAR | CCUCCAUACACAACCUGACA | 1063 | (AGAA) | 20(C5) | VQR- |
| | | | | | | | SpBE3 |
| W1161X | TGG | TAR | ACCUCCAUACACAACCUGAC | 1064 | (AAG) | 20(C6) | SpBE3 |
| W1161X | TGG | TAR | GAGAACCUCCAUACACAACC | 1065 | (TGAC) | 20 | VQR- |
| | | | | | | (C10) | SpBE3 |
| W1161X | TGG | TAR | AACCUCCAUACACAACCUGA | 1066 | (CAAGAAA) | 20(C7) | St1BE3 |
| Q1167X | CAA | TAA | CUCAUGCUGCCAAGUUAACA | 1067 | (TAG) | 20 | SpBE3 |
| | | | | | | (C11) | |
| Q1167X | CAA | TAA | CUCAUGCUGCCAAGUUAACA | 1068 | (TAGAGT) | 20 | SaBE3 |
| | | | | | | (C11) | |
| Q1167X | CAA | TAA | UCAUGCUGCCAAGUUAACAU | 1069 | (AGAG) | 20 | EQR- |
| | | | | | | (C10) | SpBE3 |
| Q1167X | CAA | TAA | CAUGCUGCCAAGUUAACAUA | 1070 | (GAG) | 20 (C9) | SpBE3 |
| Q1167X | CAA | TAA | CUGCCAAGUUAACAUAGAGU | 1071 | (CAG) | 20 (C5) | SpBE3 |
| Q1167X | CAA | TAA | UGCCAAGUUAACAUAGAGUC | 1072 | (AGG) | 20 (C4) | SpBE3 |
| Q1167X | CAA | TAA | GCCAAGUUAACAUAGAGUCA | 1073 | (GGG) | 20 (C3) | SpBE3 |
| Q1167X | CAA | TAA | CCAAGUUAACAUAGAGUCAG | 1074 | (GGAA) | 20 (C2) | VQR- |
| | | | | | | | SpBE3 |
| W1178/9X | TGG | TAR | CACCAGAUUUUUCCUUUCCC | 1075 | (TGAC) | 20 | VQR- |
| | | | | | | (C4/1) | SpBE3 |
| W1193X | TGG | TAR | AACUGUGUUCAACAAUCUUG | 1076 | (TAG) | 20(C-1) | SpBE3 |
| W1193X | TGG | TAR | CUUUCAAACCAACUGUGUUC | 1077 | (AACAAT) | 20 | KKH- |
| | | | | | | (C10) | SaBE3 |
| W1245X | TGG | TAR | UCCAUUUUAGAAGCAUUUCC | 1078 | (AGAA) | 20(C3) | VQR- |
| | | | | | | | SpBE3 |
| W1245X | TGG | TAR | AUCCAUUUUAGAAGCAUUUC | 1079 | (CAG) | 20(C4) | SpBE3 |
| W1245X | TGG | TAR | CCAUAUGCUAUCCAUUUUAG | 1080 | (AAG) | 20 | SpBE3 |
| | | | | | | (C13) | |
| W1245X | TGG | TAR | AUCCAUUUUAGAAGCAUUUC | 1081 | (CAGAAT) | 20 (C4) | SaBE3 |
| W1245X | TGG | TAR | UAUCCAUUUUAGAAGCAUUU | 1082 | (CCAGAAT) | 20 (C5) | St1BE3 |
| W1245X | TGG | TAR | AUAACCAUAUGCUAUCCAUU | 1083 | (TTAGAAG) | 20 | St1BE3 |
| | | | | | | (C17) | |
| W1245X | TGG | TAR | CAGCCAACACCAGGCAUUGG | 1084 | (TGAA) | 20 | VQR- |
| | | | | | | (C9/3) | SpBE3 |
| W1245X | TGG | TAR | UCCAGCCAACACCAGGCAUU | 1085 | (GGTG) | 20 | VQR- |
| | | | | | | (C11/5) | SpBE3 |
| W1245X | TGG | TAR | CAGCCAACACCAGGCAUUGG | 1086 | (TGAAAT) | 20 | KKH- |
| | | | | | | (C9/3) | SaBE3 |
| W1245X | TGG | TAR | AAAUCCAGCCAACACCAGGC | 1087 | (ATTGGT) | 20 | KKH- |
| | | | | | | (C14/8) | SaBE3 |
| W1245X | TGG | TAR | AUCCAGCCAACACCAGGCAU | 1088 | (TGGTG) | 20 | St3BE3 |
| | | | | | | (C12/6) | |
| W1245X | TGG | TAR | AUCCAGCCAACACCAGGCAU | 1089 | (TGG) | 20 | SpBE3 |
| | | | | | | (C12/6) | |
| W1332X | TGG | TAR | CAGAAUAUAAGACACACAAG | 1090 | (TAG) | 20 (C1) | SpBE3 |
| W1332X | TGG | TAR | AGCCAGAAUAUAAGACACAC | 1091 | (AAG) | 20 (C4) | SpBE3 |
| W1332X | TGG | TAR | UGAAUAUCAGCCAGAAUAUA | 1092 | (AGAC) | 20 | VQR- |
| | | | | | | (C12) | SpBE3 |
| W1332X | TGG | TAR | CUGAAUAUCAGCCAGAAUAU | 1093 | (AAG) | 20 | SpBE3 |
| | | | | | | (C13) | |
| W1332X | TGG | TAR | UCAGCCAGAAUAUAAGACAC | 1094 | (ACAAGT) | 20 (C6) | KKH- |
| | | | | | | | SaBE3 |
| Q1363X | CAA | TAA | AGUCAAGUUCCAAAUCGUUC | 1095 | (CGAA) | 20 (C4) | VQR- |
| | | | | | | | SpBE3 |
| Q1363X | CAA | TAA | AAGUCAAGUUCCAAAUCGUU | 1096 | (CCGAAT) | 20 (C5) | SaBE3 |
| Q1378X | CAA | TAA | UGAAUGUUAGUCAAAAUGUG | 1097 | (CGAT) | 20 | VQR- |
| | | | | | | (C12) | SpBE3 |
| Q1378X | CAA | TAA | AUGUUAGUCAAAAUGUGCGA | 1098 | (TGG) | 20(C9) | SpBE3 |
| Q1378X | CAA | TAA | UGUUAGUCAAAAUGUGCGAU | 1099 | (GGAA) | 20 (C8) | VQR- |
| | | | | | | | SpBE3 |
| Q1378X | CAA | TAA | UAUGAAUGUUAGUCAAAAUG | 1100 | (TGCGAT) | 20 | KKH- |
| | | | | | | (C14) | SaBE3 |
| R1381X | CGA | TGA | AAAUGUGCGAUGGAAAAACC | 1101 | (TGAA) | 20(C8) | VQR- |
| | | | | | | | SpBE3 |
| R1381X | CGA | TGA | UGUGCGAUGGAAAAACCUGA | 1102 | (AAG) | 20(C5) | SpBE3 |
| R1381X | CGA | TGA | GUGCGAUGGAAAAACCUGAA | 1103 | (AGTG) | 20(C4) | VQR- |
| | | | | | | | SpBE3 |
| R1381X | CGA | TGA | GCGAUGGAAAAACCUGAAAG | 1104 | (TGAA) | 20(C2) | VQR- |
| | | | | | | | SpBE3 |
| R1381X | CGA | TGA | AAUGUGCGAUGGAAAAACCU | 1105 | (GAAAGT) | 20(C7) | KKH- |
| | | | | | | | SaBE3 |
| W1382X | TGG | TAR | GGUUUUUCCAUCGCACAUUU | 1106 | (TGAC) | 20(C9) | VQR- |
| | | | | | | | SpBE3 |
| Q1401X | CAA | TAA | UAUUCUUAAAGGCAACUUUU | 1107 | (AAG) | 20 | SpBE3 |
| | | | | | | (C13) | |
| Q1401X | CAA | TAA | AUUCUUAAAGGCAACUUUUA | 1108 | (AGG) | 20 | SpBE3 |
| | | | | | | (C12) | |
| Q1401X | CAA | TAA | UUCUUAAAGGCAACUUUUAA | 1109 | (GGG) | 20 | SpBE3 |
| | | | | | | (C11) | |
| Q1401X | CAA | TAA | UCUUAAAGGCAACUUUUAAG | 1110 | (GGAT) | 20 | VQR- |
| | | | | | | (C10) | SpBE3 |
| Q1401X | CAA | TAA | UAAAGGCAACUUUUAAGGGA | 1111 | (TGG) | 20 (C7) | SpBE3 |
| Q1401X | CAA | TAA | AAAGGCAACUUUUAAGGGAU | 1112 | (GGAC) | 20 (C6) | VQR- |
| | | | | | | | SpBE3 |
| Q1401X | CAA | TAA | GGCAACUUUUAAGGGAUGGA | 1113 | (CGAT) | 20 (C3) | VQR- |
| | | | | | | | SpBE3 |
| Q1401X | CAA | TAA | AUUCUUAAAGGCAACUUUUA | 1114 | (AGGGAT) | 20 | SaBE3 |
| | | | | | | (C12) | |
| Q1401X | CAA | TAA | AAGGCAACUUUUAAGGGAUG | 1115 | (GACGAT) | 20 (C5) | KKH- |
| | | | | | | | SaBE3 |
| W1408X | TGG | TAR | AUCCCUUAAAAGUUGCCUUU | 1116 | (AAG) | 20 (C-1) | SpBE3 |
| W1408X | TGG | TAR | AAUAAUCGUCCAUCCCUUAA | 1117 | (AAG) | 20 | SpBE3 |
| | | | | | | (C11) | |
| W1408X | TGG | TAR | AUCCCUUAAAAGUUGCCUUU | 1118 | (AAGAAT) | 20 (C-1) | SaBE3 |
| W1408X | TGG | TAR | AUAAUAAUCGUCCAUCCCUU | 1119 | (AAAAGT) | 20 | KKH- |
| | | | | | | (C13) | SaBE3 |
| W1408X | TGG | TAR | CAUCCCUUAAAAGUUGCCUU | 1120 | (TAAGAAT) | 20 (C1) | St1BE3 |
| Q1424X | CAG | TAG | GUAGACAAGCAGCCCAAAUA | 1121 | (TGAA) | 20 | VQR- |
| | | | | | | (C10) | SpBE3 |
| Q1424X | CAG | TAG | AAGCAGCCCAAAUAUGAAUA | 1122 | (TAG) | 20 (C4) | SpBE3 |
| Q1462X | CAA | TAA | CAUAGAUAAUUUCAACCAAC | 1123 | (AGAA) | 20 | VQR- |
| | | | | | | (C13) | SpBE3 |
| Q1462X | CAA | TAA | AUAAUUUCAACCAACAGAAA | 1124 | (AAG) | 20 (C8) | SpBE3 |
| Q1462X | CAA | TAA | UAAUUUCAACCAACAGAAAA | 1125 | (AGAA) | 20 (C7) | VQR- |
| | | | | | | | SpBE3 |
| Q1462X | CAA | TAA | AUUUCAACCAACAGAAAAAG | 1126 | (AAG) | 20 (C5) | SpBE3 |
| Q1462X | CAA | TAA | UUUCAACCAACAGAAAAAGA | 1127 | (AGAT) | 20 (C4) | VQR- |
| | | | | | | | SpBE3 |
| Q1462X | CAA | TAA | AACCAACAGAAAAAGAAGAU | 1128 | (AAG) | 20 (C-1) | SpBE3 |
| Q1462X | CAA | TAA | AAUUUCAACCAACAGAAAAA | 1129 | (GAAGAT) | 20 (C6) | KKH- |
| | | | | | | | SaBE3 |
| Q1462X | CAA | TAA | UCAACCAACAGAAAAAGAAG | 1130 | (ATAAGT) | 20 (C2) | KKH- |
| | | | | | | | SaBE3 |
| Q1462X | CAA | TAA | GAUAAUUUCAACCAACAGAA | 1131 | (AAAGAAG) | 20 (C9) | St1BE3 |
| Q1463X | CAG | TAG | AUUUCAACCAACAGAAAAAG | 1132 | (AAG) | 20 | SpBE3 |
| | | | | | | (C12) | |
| Q1463X | CAG | TAG | UUUCAACCAACAGAAAAAGA | 1133 | (AGAT) | 20 | VQR- |
| | | | | | | (C11) | SpBE3 |
| Q1463X | CAG | TAG | AACCAACAGAAAAAGAAGAU | 1134 | (AAG) | 20 (C7) | SpBE3 |
| Q1463X | CAG | TAG | AAUUUCAACCAACAGAAAAA | 1135 | (GAAGAT) | 20 | KKH- |
| | | | | | | (C13) | SaBE3 |
| Q1463X | CAG | TAG | UCAACCAACAGAAAAAGAAG | 1136 | (ATAAGT) | 20(C9) | KKH- |
| | | | | | | | SaBE3 |
| Q1463X | CAG | TAG | AGAAAAAGAAGAUAAGUAUU | 1137 | (TCAAAT) | 20 (C-1) | KKH- |
| | | | | | | | SaBE3 |
| Q1470X | CAA | TAA | UGGAGGUCAAGACAUCUUUA | 1138 | (TGAC) | 20 (C8) | VQR- |
| | | | | | | | SpBE3 |
| Q1470X | CAA | TAA | AGGUCAAGACAUCUUUAUGA | 1139 | (CAG) | 20 (C5) | SpBE3 |
| Q1470X | CAA | TAA | GGUCAAGACAUCUUUAUGAC | 1140 | (AGAA) | 20 (C4) | VQR- |
| | | | | | | | SpBE3 |
| Q1470X | CAA | TAA | UCAAGACAUCUUUAUGACAG | 1141 | (AAG) | 20 (C2) | SpBE3 |
| Q1470X | CAA | TAA | CAAGACAUCUUUAUGACAGA | 1142 | (AGAA) | 20 (C1) | VQR- |
| | | | | | | | SpBE3 |
| Q1470X | CAA | TAA | GAGGUCAAGACAUCUUUAUG | 1143 | (ACAGAAG) | 20 (C6) | St1BE3 |
| Q1470X | CAA | TAA | GUCAAGACAUCUUUAUGACA | 1144 | (GAAGAAC) | 20 (C3) | St1BE3 |
| Q1478X | CAG | TAG | CAGAAGAACAGAAGAAAUAC | 1145 | (TATAAT) | 20 (C9) | KKH- |
| | | | | | | | SaBE3 |
| Q1478X | CAG | TAG | GAACAGAAGAAAUACUAUAA | 1146 | (TGCAAT) | 20 (C4) | KKH- |
| | | | | | | | SaBE3 |
| Q1494X | CAA | TAA | AGCCACAAAAGCCAAUUCCU | 1147 | (CGAC) | 20 (C6) | VQR- |
| | | | | | | | SpBE3 |
| Q1494X | CAA | TAA | ACAAAAGCCAAUUCCUCGAC | 1148 | (CAG) | 20 (C2) | SpBE3 |
| Q1494X | CAA | TAA | CAAAAGCCAAUUCCUCGACC | 1149 | (AGG) | 20 (C1) | SpBE3 |
| Q1494X | CAA | TAA | AAAAGCCAAUUCCUCGACCA | 1150 | (GGG) | 20 (C-1) | SpBE3 |
| Q1494X | CAA | TAA | AAAGCCAAUUCCUCGACCAG | 1151 | (GGG) | 20 (C-2) | SpBE3 |
| R1499X | CGA | TGA | AAUUCCUCGACCAGGGGUAA | 1152 | (AAAAAT) | 20 (C8) | KKH- |
| | | | | | | | SaBE3 |
| Q1505X | CAA | TAA | AAAAUCCAAGGAUGUAUAUU | 1153 | (TGAC) | 20 (C7) | VQR- |
| | | | | | | | SpBE3 |
| 01505X | CAA | TAA | CCAAGGAUGUAUAUUUGACC | 1154 | (TAG) | 20(C2) | SpBE3 |
| Q1505X | CAA | TAA | CAAGGAUGUAUAUUUGACCU | 1155 | (AGTG) | 20 (C1) | VQR- |
| | | | | | | | SpBE3 |
| Q1505X | CAA | TAA | AUCCAAGGAUGUAUAUUUGA | 1156 | (CCTAGT) | 20(C4) | KKH- |
| | | | | | | | SaBE3 |
| Q1515X | CAA | TAA | CUAGUGACAAAUCAAGCCUU | 1157 | (TGAT) | 20 (C8) | VQR- |
| | | | | | | | SpBE3 |
| Q1515X | CAA | TAA | ACAAAUCAAGCCUUUGAUAU | 1158 | (TAG) | 20 (C2) | SpBE3 |
| Q1515X | CAA | TAA | ACCUAGUGACAAAUCAAGCC | 1159 | (TTTGAT) | 20 | KKH- |
| | | | | | | (C10) | SaBE3 |
| Q1515X | CAA | TAA | UGACAAAUCAAGCCUUUGAU | 1160 | (ATTAGT) | 20 (C4) | KKH- |
| | | | | | | | SaBE3 |
| Q1539/41 | CAA | TAA | GGAGGGUCAAAGUCAACAUA | 1161 | (TGAC) | 20 (C8) | VQR- |
| X | | | | | | | SpBE3 |
| Q1539/41 | CAA | TAA | GGUCAAAGUCAACAUAUGAC | 1162 | (TGAA) | 20 | VQR- |
| X | | | | | | (C4/10) | SpBE3 |
| Q1539/41 | CAA | TAA | UCAAAGUCAACAUAUGACUG | 1163 | (AAG) | 20 | SpBE3 |
| X | | | | | | (C2/8) | |
| Q1539/41 | CAA | TAA | GGUCAAAGUCAACAUAUGAC | 1164 | (TGAAGT) | 20 | KKH- |
| X | | | | | | (C4/10) | SaBE3 |
| Q1541X | CAA | TAA | GGUCAAAGUCAACAUAUGAC | 1165 | (TGAA) | 20 | VQR- |
| | | | | | | (C10) | SpBE3 |
| Q1541X | CAA | TAA | UCAAAGUCAACAUAUGACUG | 1166 | (AAG) | 20 (C8) | SpBE3 |
| Q1541X | CAA | TAA | GGUCAAAGUCAACAUAUGAC | 1167 | (TGAAGT) | 20 | KKH- |
| | | | | | | (C4/10) | SaBE3 |
| W1549X | TGG | TAR | AUUUAUCCAAUAUAAAACUU | 1168 | (CAG) | 20 (C8) | SpBE3 |
| W1549X | TGG | TAR | ACAUUUAUCCAAUAUAAAAC | 1169 | (TTCAGT) | 20 | KKH- |
| | | | | | | (C10) | SaBE3 |
| W1578X | TGG | TAR | CCAUCCUACAGUGAAGUAGU | 1170 | (AGTG) | 20(C2) | VQR- |
| | | | | | | | SpBE3 |
| W1578X | TGG | TAR | UCCAUCCUACAGUGAAGUAG | 1171 | (TAG) | 20(C3) | SpBE3 |
| W1578X | TGG | TAR | UAUUCCAUCCUACAGUGAAG | 1172 | (TAG) | 20(C6) | SpBE3 |
| W1578X | TGG | TAR | AAAUAUUCCAUCCUACAGUG | 1173 | (AAG) | 20(C9) | SpBE3 |
| W1578X | TGG | TAR | AAAAAUAUUCCAUCCUACAG | 1174 | (TGAA) | 20 | VQR- |
| | | | | | | (C11) | SpBE3 |
| W1578X | TGG | TAR | UCAAAAAUAUUCCAUCCUAC | 1175 | (AGTG) | 20 | VQR- |
| | | | | | | (C13) | SpBE3 |
| W1578X | TGG | TAR | AUUCCAUCCUACAGUGAAGU | 1176 | (AGTAGT) | 20(C5) | KKH- |
| | | | | | | | SaBE3 |
| W1578X | TGG | TAR | AAUAUUCCAUCCUACAGUGA | 1177 | (AGTAGT) | 20(C8) | KKH- |
| | | | | | | | SaBE3 |
| W1578X | TGG | TAR | AAAAAUAUUCCAUCCUACAG | 1178 | (TGAAGT) | 20 | KKH- |
| | | | | | | (C11) | SaBE3 |
| W1578X | TGG | TAR | AAAUCAAAAAUAUUCCAUCC | 1179 | (TACAGT) | 20 | KKH- |
| | | | | | | (C16) | SaBE3 |
| R1610X | CGA | TGA | UUCCGAGUGAUCCGUCUUGC | 1180 | (CAG) | 20(C4) | SpBE3 |
| R1610X | CGA | TGA | UCCGAGUGAUCCGUCUUGCC | 1181 | (AGG) | 20(C3) | SpBE3 |
| R1610X | CGA | TGA | CCGAGUGAUCCGUCUUGCCA | 1182 | (GGAT) | 20(C2) | VQR- |
| | | | | | | | SpBE3 |
| R1610X | CGA | TGA | UUCCGAGUGAUCCGUCUUGC | 1183 | (CAGGAT) | 20(C4) | SaBE3 |
| R1619X | CGA | TGA | GAUUGGCCGAAUCCUACGUC | 1184 | (TAG) | 20(C8) | SpBE3 |
| R1619X | CGA | TGA | CCGAAUCCUACGUCUAGUCA | 1185 | (AAG) | 20(C2) | SpBE3 |
| R1619X | CGA | TGA | CGAAUCCUACGUCUAGUCAA | 1186 | (AGG) | 20(C1) | SpBE3 |
| R1619X | CGA | TGA | GAAUCCUACGUCUAGUCAAA | 1187 | (GGAG) | 20(C-1) | EQR- |
| | | | | | | | SpBE3 |
| R1619X | CGA | TGA | AGGAUUGGCCGAAUCCUACG | 1188 | (TCTAGT) | 20 | KKH- |
| | | | | | | (C10) | SaBE3 |
| R1619X | CGA | TGA | CGAAUCCUACGUCUAGUCAA | 1189 | (AGGAG) | 20 (C1) | St3BE3 |
| Q1693X | CAA | TAA | UUCCAAAUUACAACCUCUGC | 1190 | (TGG) | 20 (C4) | SpBE3 |
| Q1693X | CAA | TAA | AAAUUACAACCUCUGCUGGC | 1191 | (TGG) | 20 (C-1) | SpBE3 |
| W1700X | TGG | TAR | AGCCAGCAGAGGUUGUAAUU | 1192 | (TGG) | 20 (C1) | SpBE3 |
| W1700X | TGG | TAR | CAAUCCAUCCCAGCCAGCAG | 1193 | (AGG) | 20 | SpBE3 |
| | | | | | | (C11) | |
| W1700X | TGG | TAR | GCAAUCCAUCCCAGCCAGCA | 1194 | (GAG) | 20 | SpBE3 |
| | | | | | | (C12) | |
| W1700X | TGG | TAR | AGCAAUCCAUCCCAGCCAGC | 1195 | (AGAG) | 20 | EQR- |
| | | | | | | (C13) | SpBE3 |
| W1700X | TGG | TAR | CCAUCCCAGCCAGCAGAGGU | 1196 | (TGTAAT) | 20(C7) | KKH- |
| | | | | | | | SaBE3 |
| W1700X | TGG | TAR | AGCAAUCCAUCCCAGCCAGC | 1197 | (AGAGGT) | 20 | KKH- |
| | | | | | | (C13) | SaBE3 |
| W1786X | TGG | TAR | AAACCUCAUAGAACAUCUCA | 1198 | (AAG) | 20 (C-1) | SpBE3 |
| W1786X | TGG | TAR | AAACUUCUCCCAAACCUCAU | 1199 | (AGAA) | 20 | VQR- |
| | | | | | | (C11) | SpBE3 |
| W1786X | TGG | TAR | CAAACUUCUCCCAAACCUCA | 1200 | (TAG) | 20 | SpBE3 |
| | | | | | | (C12) | |
| W1786X | TGG | TAR | CCAAACCUCAUAGAACAUCU | 1201 | (CAAAGT) | 20 (C2) | KKH- |
| | | | | | | | SaBE3 |
| W1786X | TGG | TAR | UCAAACUUCUCCCAAACCUC | 1202 | (ATAGAAC) | 20 | St1BE3 |
| | | | | | | (C13) | |
| Q1795X | CAG | TAG | CCCGAUGCGACCCAGUUUAU | 1203 | (AGAG) | 20 | EQR- |
| | | | | | | (C13) | SpBE3 |
| Q1795X | CAG | TAG | CCGAUGCGACCCAGUUUAUA | 1204 | (GAG) | 20 | SpBE3 |
| | | | | | | (C12) | |
| Q1822X | CAG | TAG | CAAAGUCCAGCUCAUUGCCA | 1205 | (TGG) | 20(C8) | SpBE3 |
| Q1822X | CAG | TAG | AAAGUCCAGCUCAUUGCCAU | 1206 | (GGAT) | 20 (C7) | VQR- |
| | | | | | | | SpBE3 |
| Q1822X | CAG | TAG | ACAAAGUCCAGCUCAUUGCC | 1207 | (ATGGAT) | 20(C9) | SaBE3 |
| Q1862X | CAG | TAG | UCUCUUCGUUCACAGAUGGA | 1208 | (AGAA) | 20 | VQR- |
| | | | | | | (C13) | SpBE3 |
| Q1862X | CAG | TAG | CUUCGUUCACAGAUGGAAGA | 1209 | (AAG) | 20 | SpBE3 |
| | | | | | | (C10) | |
| Q1862X | CAG | TAG | UUCGUUCACAGAUGGAAGAA | 1210 | (AGG) | 20 (C9) | SpBE3 |
| Q1862X | CAG | TAG | UCUUCGUUCACAGAUGGAAG | 1211 | (AAAGGT) | 20 | KKH- |
| | | | | | | (C11) | SaBE3 |
| Q1888X | CAA | TAA | CUAAAACGGAAACAAGAGGA | 1212 | (TGTG) | 20 | VQR- |
| | | | | | | (C13) | SpBE3 |
| Q1897X | CAG | TAG | ACUGUCAUUCAGCGUGCUUA | 1213 | (TAG) | 20 | SpBE3 |
| | | | | | | (C10) | |
| Q1897X | CAG | TAG | CUGUCAUUCAGCGUGCUUAU | 1214 | (AGAC) | 20(C9) | VQR- |
| | | | | | | | SpBE3 |
| Q1907X | CAA | TAA | CAAAAUGUCAAAAAUAUAUC | 1215 | (AAG) | 20 (C1) | SpBE3 |
| Q1907X | CAA | TAA | ACCGCUUAAGGCAAAAUGUC | 1216 | (AAT) | 20 | KKH- |
| | | | | | | (C12) | SaBE3 |
| Q1907X | CAA | TAA | GGCAAAAUGUCAAAAAUAUA | 1217 | (TCAAGT) | 20 (C3) | KKH- |
| | | | | | | | SaBE3 |
| Q1971X | CAA | TAA | GAAAUAUGAACAAGACAGAA | 1218 | (CAG) | 20 | SpBE3 |
| | | | | | | (C11) | |
| Q1971X | CAA | TAA | AAAUAUGAACAAGACAGAAC | 1219 | (AGAA) | 20 | VQR- |
| | | | | | | (C10) | SpBE3 |
| Q1971X | CAA | TAA | AUGAACAAGACAGAACAGAA | 1220 | (AAG) | 20 (C6) | SpBE3 |
| Q1971X | CAA | TAA | UGAACAAGACAGAACAGAAA | 1221 | (AGG) | 20 (C5) | SpBE3 |
| Q1971X | CAA | TAA | GAACAAGACAGAACAGAAAA | 1222 | (GGAA) | 20 (C4) | VQR- |
| | | | | | | | SpBE3 |
| Q1971X | CAA | TAA | ACAAGACAGAACAGAAAAGG | 1223 | (AAG) | 20 (C2) | SpBE3 |
| Q1971X | CAA | TAA | CAAGACAGAACAGAAAAGGA | 1224 | (AGAC) | 20 (C1) | VQR- |
| | | | | | | | SpBE3 |
| Q1971X | CAA | TAA | AGAAAUAUGAACAAGACAGA | 1225 | (ACAGAAA) | 20 | St1BE3 |
| | | | | | | (C12) | |

^{a}BE types: SpBE3 = APOBEC1-SpCas9n-UGI; VQR-SpBE3 = APOBEC1-VQR-SpCas9n-UGI; EQR-SpBE3 = APOBEC1-EQR-SpCas9n-UGI; VRER-SpBE3 = APOBEC1-VRER-SpCas9n-UGI; SaBE3 = APOBEC1-SaCas9n-UGI; KKH-SaBE3 = APOBEC1-KKH-SaCas9n-UGI; St3BE3 = APOBEC1-St3Cas9n-UGI; St1BE3 = APOBEC1-St1Cas9n-UGI.

### Target Base in Non-Coding Region—Splicing Variants

[0106] Some aspects of the present disclosure provide strategies of reducing the activity of ion channels (e.g., ion channels in in DRG neurons) via preventing the ion channel mRNA maturation and production. In some embodiments, such strategies involve alterations of splicing sites in the ion channel gene. Altered splicing site may lead to altered splicing and maturation of the ion channel mRNA. For example, in some embodiments, an altered splicing site may lead to the skipping of an exon, in turn leading to a truncated protein product or an altered reading frame. In some embodiments, an altered splicing site may lead to translation of an intron sequence and premature translation termination when an in frame stop codon is encountered by the translating ribosome in the intron. In some embodiments, a start codon is edited and protein translation initiates at the next ATG codon, which may not be in the correct coding frame.

[0107] The splicing sites typically comprises an intron donor site, a Lariat branch point, and an intron acceptor site. The mechanism of splicing are familiar to those skilled in the art. As illustrated in FIG. 3, the intron donor site has a consensus sequence of GGGTRAGT, and the C bases paired with the G bases in the intron donor site consensus sequence may be targeted by a nucleobase editors described herein, thereby altering the intron donor site. The Lariat branch point also has consensus sequences, e.g., YTRAC, wherein Y is a pyrimidine, and R is a purine. The C base in the Lariat branch point consensus sequence may be targeted by the nucleobase editors, leading to the skipping of the following exon. The intron acceptor site has a consensus sequence of YNCAGG, wherein Y is a pyrimidine, and N is any nucleotide. The C base of the consensus sequence of the intron acceptor site, and the C base paired with the G bases in the consensus sequence of the intron acceptor site may be targeted by the nucleobase editors described herein, thereby altering the intron acceptor site, in turn leading the skipping of an exon. General strategies of altering the splicing sites of the ion channel gene are described in Table 5.

TABLE 5
Exemplary Alteration of Intron-Exon Junction via Base Editing

| | Consensus | Base-editing | Edited | |
|---|---|---|---|---|
| Target site | Sequence | reaction (s) | sequence | Outcome |
| Intron | GGGTRAGT | 2^{nd} or 3^{rd} base | GAGTRAGT | Intron sequence is |
| donor | (example) | C to T on | (example) | translated as exon, in frame |
| | | complementary | | premature STOP codon |
| | | strand | | |
| Lariat | YTRAC | 5^{th} base | YTRAT | The following exon is |
| branch | (example) | C to T on | (example) | skipped from the mature |
| point | | coding | | mRNA, which may affect |
| | | strand | | the coding frame |
| Intron | Y(rich)NCAGG | 2^{nd} to last base | Y(rich)NCAAG | The exon is skipped from |
| acceptor | (example) | C to T on | (example) | the mature mRNA, which |
| | | complementary | | may affect the coding frame |
| | | strand | | |
| Start | ATG (Met/M) | 3^{rd} base | ATA (Ile/I) | The next ATG is used as |
| codon | | C to T on | | start codon, which may |
| | | complementary | | affect the coding frame |
| | | strand | | |

[0108] Provided in Table 6 are non-limiting examples of alterations that may be made to non-coding regions (e.g., splicing sites) in the SCN9A gene using nucleobase editors and the guide sequences that may be used for each alteration.

TABLE 6
Alteration of Intron/Exon Junctions in NaV1.7 (SCN9A) Gene via Base Editing

| Target | Genome target seq. / | Programmable guide- | SEQ ID | | gRNA size | |
|---|---|---|---|---|---|---|
| site* | junction | RNA sequence | NOs | (PAM) | (C edited) | BE type^{a} |
| donor, | CTAGGTTGCAAgtaagtgccttt | UUACUUGCAACCUAGCCCGC | 1226 | (CGAT) | 20(C4) | VQR-SpBE3 |
| intron 1 | (SEQ ID NO: 1457) | AAAGGCACUUACUUGCAACC | 1227 | (TAG) | 20(C12) | SpBE3 |
| | | ACUUACUUGCAACCUAGCCC | 1228 | (GCCGAT) | 20(C6) | KKH-SaBE3 |
| acceptor, | ctttgtttccatccagGCCTCTT | AGAGGCCUGGAUGGAAACAA | 1229 | (AGAA) | 20(C6/7) | VQR-SpBE3 |
| intron 1 | (SEQ ID NO: 1458) | AAGAGGCCUGGAUGGAAACA | 1230 | (AAG) | 20(C7/8) | SpBE3 |
| | | AGAGGCCUGGAUGGAAACAA | 1231 | (AGAAAT) | 20(C6/7) | KKH-SaBE3 |
| | | UAAGAGGCCUGGAUGGAAAC | 1232 | (AAAGAAA) | 20(C8/9) | St1BE3 |
| donor, | CTATGCAGACAAAAAGgtgagtt | CCUUUUUGUCUGCAUAGUAG | 1233 | (GGG) | 20(C1/2) | SpBE3 |
| intron 2 | (SEQ ID NO: 1459) | ACCUUUUUGUCUGCAUAGUA | 1234 | (GGG) | 20(C2/3) | SpBE3 |
| | | CACCUUUUUGUCUGCAUAGU | 1235 | (AGG) | 20(C3/4) | SpBE3 |
| | | UCACCUUUUUGUCUGCAUAG | 1236 | (TAG) | 20(C4/5) | SpBE3 |
| | | AACUCACCUUUUUGUCUGCA | 1237 | (TAG) | 20(C7/8) | SpBE3 |
| | | CACCUUUUUGUCUGCAUAGU | 1238 | (AGGGGT) | 20(C3/4) | SaBE3 |
| | | UAAACUCACCUUUUUGUCUG | 1239 | (CATAGT) | 20(C9/10) | KKH-SaBE3 |
| | | CACCUUUUUGUCUGCAUAGU | 1240 | (AGGGG) | 20(C3/4) | St3BE3 |
| acceptor, | ctttttcctcctgcagACTTTCA | UCUGCAGGAGGAAAAAGAAA | 1241 | (GGAT) | 20(C2) | VQR-SpBE3 |
| intron 2 | (SEQ ID NO: 1460) | GUCUGCAGGAGGAAAAAGAA | 1242 | (AGG) | 20(C3) | SpBE3 |
| | | AGUCUGCAGGAGGAAAAAGA | 1243 | (AAG) | 20(C4) | SpBE3 |
| | | GAAAGUCUGCAGGAGGAAAA | 1244 | (AGAA) | 20(C7) | VQR-SpBE3 |
| | | UGAAAGUCUGCAGGAGGAAA | 1245 | (AAG) | 20(C8) | SpBE3 |
| | | UACUAUGAAAGUCUGCAGGA | 1246 | (GGAA) | 20(C13) | VQR-SpBE3 |
| | | AGUCUGCAGGAGGAAAAAGA | 1247 | (AAGGAT) | 20(C4) | SaBE3 |
| | | AUGAAAGUCUGCAGGAGGAA | 1248 | (AAAGAAA) | 20(C9) | St1BE3 |
| donor, | TAGTACACTCatatccttttaaaaat | CACUCAUAUCCUUUUAAAAA | 1249 | (TGAT) | 20(C3/5) | VQR-SpBE3 |
| intron 3 | (SEQ ID NO: 1461) | UAGUACACUCAUAUCCUUUU | 1250 | (AAAAAT) | 20(CE00) | KKH-SaBE3 |
| | | UACACUCAUAUCCUUUUAAA | 1251 | (AATGAT) | 20(C5/7) | KKH-SaBE3 |
| acceptor, | tgattctaagctacCTTATTCAG | UGAUUCUAAGCUACCUUAUU | 1252 | (CAG) | 20(C11/14) | SpBE3 |
| intron 3 | (SEQ ID NO: 1462) | | | | | |
| donor, | CCAAAAATGTCGAgtaagtgggt | CUUACUCGACAUUUUUGGUC | 1253 | (CAG) | 20(C5) | SpBE3 |
| intron 4 | (SEQ ID NO: 1463) | ACCCACUUACUCGACAUUUU | 1254 | (TGG) | 20(C10) | SpBE3 |
| | | ACUCGACAUUUUUGGUCCAG | 1255 | (TCCGGT) | 20(C2) | KKH-SaBE3 |
| | | CACUUACUCGACAUUUUUGG | 1256 | (TCCAGT) | 20(C7) | KKH-SaBE3 |
| | | AUACCCACUUACUCGACAUU | 1257 | (TTTGGT) | 20(C12) | KKH-SaBE3 |
| acceptor, | atcttgtgtttagGTACACTTTTA | CCUAAACACAAGAUUCCAUU | 1258 | (GGG) | 20(C1/2) | SpBE3 |
| intron 4 | (SEQ ID NO: 1464) | ACCUAAACACAAGAUUCCAU | 1259 | (TGG) | 20(C2/3) | SpBE3 |
| | | UAAAAGUGUACCUAAACACA | 1260 | (AGAT) | 20(C11/12) | VQR-SpBE3 |
| | | GUAAAAGUGUACCUAAACAC | 1261 | (AAG) | 20(C12/13) | SpBE3 |
| | | ACCUAAACACAAGAUUCCAU | 1262 | (TGGGAT) | 20(C2/3) | SaBE3 |
| | | AGUAAAAGUGUACCUAAACA | 1263 | (CAAGAT) | 20(C13/14) | KKH-SaBE3 |
| donor, | ATTGTTTTTGCgtaagtactttcagc | UACUUACGCAAAAACAAUGA | 1264 | (CGAC) | 20(C7) | VQR-SpBE3 |
| intron 5 | (SEQ ID NO: 1465) | AAGUACUUACGCAAAAACAA | 1265 | (TGAC) | 20(C10) | VQR-SpBE3 |
| | | UUACGCAAAAACAAUGACGA | 1266 | (CAAAAT) | 20(C4) | KKH-SaBE3 |
| | | GCUGAAAGUACUUACGCAAA | 1267 | (AACAAT) | 20(C15) | KKH-SaBE3 |
| acceptor, | atttaattctacagGTATTTAACAGA | AAUACCUGUAGAAUUAAAUC | 1268 | (AGAA) | 20(C5/6) | VQR-SpBE3 |
| intron 5 | (SEQ ID NO: 1466) | AAAUACCUGUAGAAUUAAAU | 1269 | (CAG) | 20(C6/7) | SpBE3 |
| | | AAAUACCUGUAGAAUUAAAU | 1270 | (CAGAAT) | 20(C6/7) | SaBE3 |
| | | UCUGUUAAAUACCUGUAGAA | 1271 | (TTAAAT) | 20(C12/13) | KKH-SaBE3 |
| | | UAAAUACCUGUAGAAUUAAA | 1272 | (TCAGAAT) | 20(C7/8) | St1BE3 |
| donor, | CTGTAATCCCAGgtaagaagtaa | CUUACCUGGGAUUACAGAAA | 1273 | (TAG) | 20(C5/6) | SpBE3 |
| intron 6 | (SEQ ID NO: 1467) | UACUUCUUACCUGGGAUUAC | 1274 | (AGAA) | 20(C10/11) | VQR-SpBE3 |
| | | UUACUUCUUACCUGGGAUUA | 1275 | (CAG) | 20(C11/12) | SpBE3 |
| | | UUCUUACCUGGGAUUACAGA | 1276 | (AATAGT) | 20(C7/8) | KKH-SaBE3 |
| | | UACUUCUUACCUGGGAUUAC | 1277 | (AGAAAT) | 20(C10/11) | KKH-SaBE3 |
| | | AUUACUUCUUACCUGGGAUU | 1278 | (ACAGAAA) | 20(C12/13) | St1BE3 |
| acceptor, | ctcccattttcagGCCTGAAGAC | GCCUGAAAAUGGGAGAAAAA | 1279 | (AGTG) | 20(C2/3) | VQR-SpBE3 |
| intron 6 | (SEQ ID NO: 1468) | GGCCUGAAAAUGGGAGAAAA | 1280 | (AAG) | 20(C3/4) | SpBE3 |
| | | UCUUCAGGCCUGAAAAUGGG | 1281 | (AGAA) | 20(C9/10) | VQR-SpBE3 |
| | | GUCUUCAGGCCUGAAAAUGG | 1282 | (GAG) | 20(C10/11) | SpBE3 |
| | | UGUCUUCAGGCCUGAAAAUG | 1283 | (GGAG) | 20(C11/12) | EQR-SpBE3 |
| | | UUGUCUUCAGGCCUGAAAAU | 1284 | (GGG) | 20(C12/13) | SpBE3 |
| | | CAGGCCUGAAAAUGGGAGAA | 1285 | (AAAAGT) | 20(C5/6) | KKH-SaBE3 |
| | | UGUCUUCAGGCCUGAAAAUG | 1286 | (GGAGAAA) | 20(C11/12) | St1BE3 |
| | | UUGUCUUCAGGCCUGAAAAU | 1287 | (GGGAG) | 20(C12/13) | St3BE3 |
| acceptor, | ttcttcttcaacagAATATTTTTA | CUGUUGAAGAAGAAUUUGAA | 1288 | (CAG) | 20(C1) | SpBE3 |
| intron 7 | (SEQ ID NO: 1469) | UAUUCUGUUGAAGAAGAAUU | 1289 | (TGAA) | 20(C5) | VQR-SpBE3 |
| | | UAAAAAUAUUCUGUUGAAGA | 1290 | (AGAA) | 20(C11) | VQR-SpBE3 |
| | | AUAAAAAUAUUCUGUUGAAG | 1291 | (AAG) | 20(C12) | SpBE3 |
| | | UUCUGUUGAAGAAGAAUUUG | 1292 | (AACAGT) | 20(C3) | KKH-SaBE3 |
| | | AUAAAAAUAUUCUGUUGAAG | 1293 | (AAGAAT) | 20(C12) | SaBE3 |
| | | AAUAAAAAUAUUCUGUUGAA | 1294 | (GAAGAAT) | 20(C13) | St1BE3 |
| | | AGUAAUAAAAAUAUUCUGUU | 1295 | (GAAGAAG) | 20(C16) | St1BE3 |
| donor, | CACAGATTCAGGgtatgtaatatt | UACAUACCCUGAAUCUGUGC | 1296 | (TGAA) | 20(C7/8) | VQR-SpBE3 |
| intron 8 | (SEQ ID NO: 1470) | AAUAUUACAUACCCUGAAUC | 1297 | (TGTG) | 20(C12/13) | VQR-SpBE3 |
| acceptor, | ctttctcgtgtgtagTCAGTGTC | ACACUGACUACACACGAGAA | 1298 | (AGAA) | 20(C8) | VQR-SpBE3 |
| intron 8 | (SEQ ID NO: 1471) | GACACUGACUACACACGAGA | 1299 | (AAG) | 20(C9) | SpBE3 |
| | | CUGGACACUGACUACACACG | 1300 | (AGAA) | 20(C12) | VQR-SpBE3 |
| donor, | CTTTACCAACAGgtgagtaccaa | CCUGUUGGUAAAGGUUUUCC | 1301 | (CAG) | 20(C1/2) | SpBE3 |
| intron 9 | (SEQ ID NO: 1472) | UGGUACUCACCUGUUGGUAA | 1302 | (AGG) | 20(C10/11) | SpBE3 |
| | | UUGGUACUCACCUGUUGGUA | 1303 | (AAG) | 20(C11/12) | SpBE3 |
| | | CACCUGUUGGUAAAGGUUUU | 1304 | (CCCAGT) | 20(C3/4) | KKH-SaBE3 |
| | | CUUGGUACUCACCUGUUGGU | 1305 | (AAAGGT) | 20(C12/13) | KKH-SaBE3 |
| acceptor, | ccatttttccctagACGCTGCGT | CGCAGCGUCUAGGGAAAAAU | 1306 | (GGAA) | 20(C9) | VQR-SpBE3 |
| intron 9 | (SEQ ID NO: 1473) | ACGCAGCGUCUAGGGAAAAA | 1307 | (TGG) | 20(C10) | SpBE3 |
| | | CGCAGCGUCUAGGGAAAAAU | 1308 | (GGAAAT) | 20(C9) | KKH-SaBE3 |
| | | GCAGCACGCAGCGUCUAGGG | 1309 | (AAAAAT) | 20(C15) | KKH-SaBE3 |
| acceptor, | cttggcccaaccagGCAATTGCA | GCAAUUGCCUGGUUGGGCCA | 1310 | (AGAC) | 20(C8/9) | VQR-SpBE3 |
| intron 10 | (SEQ ID NO: 1474) | UGCAAUUGCCUGGUUGGGCC | 1311 | (AAG) | 20(C9/10) | SpBE3 |
| donor, | CCCCCAATCAGgtaccacccaaa | GGUGGUACCUGAUUGGGGGU | 1312 | (AGAC) | 20(C8/9) | VQR-SpBE3 |
| intron 11 | (SEQ ID NO: 1475) | GGGUGGUACCUGAUUGGGGG | 1313 | (TAG) | 20(C9/10) | SpBE3 |
| | | UUUGGGUGGUACCUGAUUGG | 1314 | (GGG) | 20(C12/13) | SpBE3 |
| | | AAUUUGGGUGGUACCUGAUU | 1315 | (GGGGGT) | 20(C14/15) | SaBE3 |
| | | AAUUUGGGUGGUACCUGAUU | 1316 | (GGGGG) | 20(C14/15) | St3BE3 |
| acceptor, | atttttctgcagTCACCACTCAGCAT | AUGCUGAGUGGUGACUGCAG | 1317 | (AAAAAT) | 20(C15) | KKH-SaBE3 |
| intron 11 | (SEQ ID NO: 1476) | | | | | |
| donor, | TTCTGCCAGAGgtgataatagata | UCUAUUAUCACCUCUGGCAG | 1318 | (AAG) | 20(C11/12) | SpBE3 |
| intron 12a | (SEQ ID NO: 1477) | UAUCUAUUAUCACCUCUGGC | 1319 | (AGAA) | 20(C13/14) | VQR-SpBE3 |
| | | CUUAUCUAUUAUCACCUCUG | 1320 | (GCAGAAG) | 20(C15/16) | St1BE3 |
| donor, | CTGATGACAGCgtaaggacg | CGUCCUUACGCUGUCAUCAG | 1321 | (AAG) | 20(C9) | SpBE3 |
| intron 12b | (SEQ ID NO: 1478) | AACGUCCUUACGCUGUCAUC | 1322 | (AGAA) | 20(C11) | VQR-SpBE3 |
| | | AAACGUCCUUACGCUGUCAU | 1323 | (CAG) | 20(C12) | SpBE3 |
| | | AACGUCCUUACGCUGUCAUC | 1324 | (AGAAGT) | 20(C11) | KKH-SaBE3 |
| | | AAAACGUCCUUACGCUGUCA | 1325 | (TCAGAAG) | 20(C13) | St1BE3 |
| acceptor, | attgattttttttttagGGCACGACC | GUGCCCUAAAAAAAAAAUCA | 1326 | (ATTAAT) | 20(C5/6) | KKH-SaBE3 |
| intron 13 | (SEQ ID NO: 1479) | GGUCGUGCCCUAAAAAAAAA | 1327 | (ATCAAT) | 20(C9/10) | KKH-SaBE3 |
| | | GAUUGGUCGUGCCCUAAAAA | 1328 | (AAAAAT) | 20(C13/14) | KKH-SaBE3 |
| donor, | CACTGTGGAAGgtatgtaataatc | GAUUAUUACAUACCUUCCAC | 1329 | (AGTG) | 20(C13/14) | VQR-SpBE3 |
| intron 13 | (SEQ ID NO: 1480) | ACAUACCUUCCACAGUGUUU | 1330 | (GTTAAT) | 20(C6/7) | KKH-SaBE3 |
| acceptor, | cttttttctcccagAACTTGAAG | GUUCUGGGAGAAAAAAGCAG | 1331 | (AGAA) | 20(C4) | VQR-SpBE3 |
| intron 13 | (SEQ ID NO: 1481) | AGUUCUGGGAGAAAAAAGCA | 1332 | (GAG) | 20(C5) | SpBE3 |
| | | AAGUUCUGGGAGAAAAAAGC | 1333 | (AGAG) | 20(C6) | EQR-SpBE3 |
| | | CAAGUUCUGGGAGAAAAAAG | 1334 | (CAG) | 20(C7) | SpBE3 |
| | | UCAAGUUCUGGGAGAAAAAA | 1335 | (GCAG) | 20(C8) | FALSE |
| | | CUUCAAGUUCUGGGAGAAAA | 1336 | (AAG) | 20(C10) | SpBE3 |
| | | AAGUUCUGGGAGAAAAAAGC | 1337 | (AGAGAAC) | 20(C6) | St1BE3 |
| donor, | CTATAGGAAATTTGgtaagtctc | CUUACCAAAUUUCCUAUAGC | 1338 | (AAG) | 20(C1/2) | SpBE3 |
| intron 14 | (SEQ ID NO: 1482) | GAGACUUACCAAAUUUCCUA | 1339 | (TAG) | 20(C5/6) | SpBE3 |
| | | GACUUACCAAAUUUCCUAUA | 1340 | (GCAAGT) | 20(C7/8) | KKH-SaBE3 |
| acceptor, | atttttctcacttagGTCTTTACTGG | UUCCAGUAAAGACCUAAGUG | 1341 | (AGAA) | 20(C13/14) | VQR-SpBE3 |
| intron 14 | (SEQ ID NO: 1483) | GAUUCCAGUAAAGACCUAAG | 1342 | (TGAG) | 20(C13/14) | EQR-SpBE3 |
| | | GUAAAGACCUAAGUGAGAAA | 1343 | (AATAAT) | 20(C8/9) | KKH-SaBE3 |
| | | CCAGUAAAGACCUAAGUGAG | 1344 | (AAAAAT) | 20(C11/12) | KKH-SaBE3 |
| | | GAUUCCAGUAAAGACCUAAG | 1345 | (TGAGAAA) | 20(C15/16) | St1BE3 |
| donor, | ATCATTCAGACTGgtaaacataaa | UUACCAGUCUGAAUGAUCGC | 1346 | (AGAA) | 20(C4/5) | VQR-SpBE3 |
| intron 15 | (SEQ ID NO: 1484) | UUUACCAGUCUGAAUGAUCG | 1347 | (CAG) | 20(C5/6) | SpBE3 |
| | | UUUAUGUUUACCAGUCUGAA | 1348 | (TGAT) | 20(C11/12) | VQR-SpBE3 |
| | | AGUUUAUGUUUACCAGUCUG | 1349 | (AATGAT) | 20(C13/14) | KKH-SaBE3 |
| | | GUUUACCAGUCUGAAUGAUC | 1350 | (GCAGAAC) | 20(C6/7) | St1BE3 |
| acceptor, | actttatatttgcttttagCTCCGAG | CGGAGCUAAAAGCAAAUAUA | 1351 | (AAG) | 20(C6) | SpBE3 |
| intron 15 | (SEQ ID NO: 1485) | AGCUAAAAGCAAAUAUAAAG | 1352 | (TTTAAT) | 20(C3) | KKH-SaBE3 |
| | | CUCGGAGCUAAAAGCAAAUA | 1353 | (TAAAGT) | 20(C8) | KKH-SaBE3 |
| | | UUGAAGACUCGGAGCUAAAA | 1354 | (GCAAAT) | 20(C15) | KKH-SaBE3 |
| donor, | ATTGGAAACCTGGTGgtatgtaacca | CACCAGGUUUCCAAUGACCA | 1355 | (TGAC) | 20(C1) | VQR-SpBE3 |
| intron 16 | (SEQ ID NO: 1486) | ACAUACCACCAGGUUUCCAA | 1356 | (TGAC) | 20 (C7) | VQR-SpBE3 |
| | | UGGUUACAUACCACCAGGUU | 1357 | (TCCAAT) | 20(C12) | KKH-SaBE3 |
| acceptor, | ccaccctgatatagGTCCTAAAC | CUAUAUCAGGGUGGGGAGAG | 1358 | (GGG) | 20(C1/2) | SpBE3 |
| intron 16 | (SEQ ID NO: 1487) | CCUAUAUCAGGGUGGGGAGA | 1359 | (GGG) | 20(C2/3) | SpBE3 |
| | | ACCUAUAUCAGGGUGGGGAG | 1360 | (AGG) | 20(C3/4) | SpBE3 |
| | | GACCUAUAUCAGGGUGGGGA | 1361 | (GAG) | 20(C4/5) | SpBE3 |
| | | GGACCUAUAUCAGGGUGGGG | 1362 | (AGAG) | 20(C5/6) | EQR-SpBE3 |
| | | AGGACCUAUAUCAGGGUGGG | 1363 | (GAG) | 20(C6/7) | SpBE3 |
| | | UAGGACCUAUAUCAGGGUGG | 1364 | (GGAG) | 20(C7/8) | EQR-SpBE3 |
| | | UUAGGACCUAUAUCAGGGUG | 1365 | (GGG) | 20(C8/9) | SpBE3 |
| | | UUUAGGACCUAUAUCAGGGU | 1366 | (GGG) | 20(C9/10) | SpBE3 |
| | | GUUUAGGACCUAUAUCAGGG | 1367 | (TGG) | 20(C10/11) | SpBE3 |
| | | AGGUUUAGGACCUAUAUCAG | 1368 | (GGTG) | 20(C12/13) | VQR-SpBE3 |
| | | CCUAUAUCAGGGUGGGGAGA | 1369 | (GGGGGT) | 20(C2/3) | SaBE3 |
| | | AAUAGGUUUAGGACCUAUAU | 1370 | (CAGGGT) | 20(C15/16) | SaBE3 |
| | | CCUAUAUCAGGGUGGGGAGA | 1371 | (GGGGG) | 20(C2/3) | St3BE3 |
| | | ACCUAUAUCAGGGUGGGGAG | 1372 | (AGGGG) | 20(C3/4) | St3BE3 |
| | | UUAGGACCUAUAUCAGGGUG | 1373 | (GGGAG) | 20(C8/9) | St3BE3 |
| | | AGGACCUAUAUCAGGGUGGG | 1374 | (GAG) | 20(C6/7) | SpBE3 |
| | | GUUUAGGACCUAUAUCAGGG | 1375 | (TGGGG) | 20(C10/11) | St3BE3 |
| | | UAGGUUUAGGACCUAUAUCA | 1376 | (GGGTG) | 20(C13/14) | St3BE3 |
| donor, | CTGTTTCACAGATGgtaagacaa | CCAUCUGUGAAACAGGCCUC | 1377 | (TGG) | 20(C1/2) | SpBE3 |
| intron 18 | (SEQ ID NO: 1488) | UGUCUUACCAUCUGUGAAAC | 1378 | (AGG) | 20(C8/9) | SpBE3 |
| | | UUGUCUUACCAUCUGUGAAA | 1379 | (CAG) | 20(C9/10) | SpBE3 |
| acceptor, | gtctttcttgtcagGTTGTGTATG | CAUACACAACCUGACAAGAA | 1380 | (AGAC) | 20(C10/11) | VQR-SpBE3 |
| intron 18 | (SEQ ID NO: 1489) | CCAUACACAACCUGACAAGA | 1381 | (AAG) | 20(C11/12) | SpBE3 |
| | | AACCUCCAUACACAACCUGA | 1382 | (CAAGAAA) | 20(C16/17) | St1BE3 |
| donor, | CTCAGCAGTGGTGCCCTGgtaaat | CCAGGGCACCACUGCUGAGC | 1383 | (AGG) | 20(C1/2) | SpBE3 |
| intron 19 | (SEQ ID NO: 1490) | ACCAGGGCACCACUGCUGAG | 1384 | (CAG) | 20(C2/3) | SpBE3 |
| | | UUUACCAGGGCACCACUGCU | 1385 | (GAG) | 20(C5/6) | SpBE3 |
| | | AUUUACCAGGGCACCACUGC | 1386 | (TGAG) | 20(C6/7) | EQR-SpBE3 |
| | | ACCAGGGCACCACUGCUGAG | 1387 | (CAGGAT) | 20(C2/3) | SaBE3 |
| acceptor, | attatttccacagGCTTTTGAAGATA | AGCCUGUGGAAAUAAUAUUC | 1388 | (AAG) | 20(C3/4) | SpBE3 |
| intron 19 | (SEQ ID NO: 1491) | AAAGCCUGUGGAAAUAAUAU | 1389 | (TCAAGT) | 20(C5/6) | KKH-SaBE3 |
| | | UAUCUUCAAAAGCCUGUGGA | 1390 | (AATAAT) | 20(C13/14) | KKH-SaBE3 |
| donor, | CCTAATTGTTGATgtaggtactt | ACAUCAACAAUUAGGAAAUC | 1391 | (CAG) | 20(C2) | SpBE3 |
| intron 20 | (SEQ ID NO: 1492) | AGUACCUACAUCAACAAUUA | 1392 | (GGAA) | 20(C9) | VQR-SpBE3 |
| | | AAGUACCUACAUCAACAAUU | 1393 | (AGG) | 20(C10) | SpBE3 |
| | | AAAGUACCUACAUCAACAAU | 1394 | (TAG) | 20(C11) | SpBE3 |
| | | AGUACCUACAUCAACAAUUA | 1395 | (GGAAAT) | 20(C9) | KKH-SaBE3 |
| donor, | ATTTGAAGGAATGAGGgtaagaaaat | ACCCUCAUUCCUUCAAAUCU | 1396 | (AGAT) | 20(C2/3) | VQR-SpBE3 |
| intron 21 | (SEQ ID NO: 1493) | UACCCUCAUUCCUUCAAAUC | 1397 | (TAG) | 20(C3/4) | SpBE3 |
| | | UUACCCUCAUUCCUUCAAAU | 1398 | (CTAGAT) | 20(C4/5) | KKH-SaBE3 |
| | | AUUUUCUUACCCUCAUUCCU | 1399 | (TCAAAT) | 20(C10/11) | KKH-SaBE3 |
| acceptor, | cttttgaatactagGTCGTTGTG | CUAGUAUUCAAAAGAAAGAA | 1400 | (AAG) | 20(C1) | SpBE3 |
| intron 21 | (SEQ ID NO: 1494) | CGACCUAGUAUUCAAAAGAA | 1401 | (AGAA) | 20(C5) | VQR-SpBE3 |
| | | ACGACCUAGUAUUCAAAAGA | 1402 | (AAG) | 20(C6) | SpBE3 |
| | | ACAACGACCUAGUAUUCAAA | 1403 | (AGAA) | 20(C9) | VQR-SpBE3 |
| | | CACAACGACCUAGUAUUCAA | 1404 | (AAG) | 20(C10) | SpBE3 |
| | | AACGACCUAGUAUUCAAAAG | 1405 | (AAAGAAA) | 20(C7) | St1BE3 |
| | | UCACAACGACCUAGUAUUCA | 1406 | (AAAGAAA) | 20(C11) | St1BE3 |
| donor, | CTGCTTCAAGTTgtaagtgtccc | UUACAACUUGAAGCAGAGAU | 1407 | (AGG) | 20(C4) | SpBE3 |
| intron 22 | (SEQ ID NO: 1495) | CUUACAACUUGAAGCAGAGA | 1408 | (TAG) | 20(C5) | SpBE3 |
| | | ACACUUACAACUUGAAGCAG | 1409 | (AGAT) | 20(C8) | VQR-SpBE3 |
| | | GACACUUACAACUUGAAGCA | 1410 | (GAG) | 20(C9) | SpBE3 |
| | | GGACACUUACAACUUGAAGC | 1411 | (AGAG) | 20(C9) | EQR-SpBE3 |
| | | GGGACACUUACAACUUGAAG | 1412 | (CAG) | 20(C11) | SpBE3 |
| | | ACUUACAACUUGAAGCAGAG | 1413 | (ATAGGT) | 20(C6) | KKH-SaBE3 |
| | | GGACACUUACAACUUGAAGC | 1414 | (AGAGAT) | 20(C10) | KKH-SaBE3 |
| acceptor, | attaatgttattcttaaagGCAACTT | CCUUUAAGAAUAACAUUAAU | 1415 | (AGAA) | 20(C1/2) | VQR-SpBE3 |
| intron 22 | (SEQ ID NO: 1496) | GCCUUUAAGAAUAACAUUAA | 1416 | (TAG) | 20(C2/3) | SpBE3 |
| | | GCCUUUAAGAAUAACAUUAA | 1417 | (TAGAAT) | 20(C2/3) | SaBE3 |
| | | AAGUUGCCUUUAAGAAUAAC | 1418 | (ATTAAT) | 20(C7/8) | KKH-SaBE3 |
| | | UGCCUUUAAGAAUAACAUUA | 1419 | (ATAGAAT) | 20(C3/4) | St1BE3 |
| donor, | ATTCTGTTAATgtaagtattgattat | AUAAUCAAUACUUACAUUAA | 1420 | (CAGAAT) | 20(C15) | SaBE3 |
| intron 23 | (SEQ ID NO: 1497) | GAUAAUCAAUACUUACAUUA | 1421 | (ACAGAAT) | 20(C16) | St1BE3 |
| acceptor, | acttttgtaaattttatagGTAGACA | CCUAUAAAAUUUACAAAAGU | 1422 | (TAG) | 20(C1/2) | SpBE3 |
| intron 23 | (SEQ ID NO: 1498) | UCUACCUAUAAAAUUUACAA | 1423 | (AAG) | 20(C5/6) | SpBE3 |
| | | UGUCUACCUAUAAAAUUUAC | 1424 | (AAAAGT) | 20(C7/8) | KKH-SaBE3 |
| donor, | ACCAACAGAAAAAGAAGataagtatt | UAUCUUCUUUUUCUGUUGGU | 1425 | (TGAA) | 20(C4) | VQR-SpBE3 |
| intron 24 | (SEQ ID NO: 1499) | UACUUAUCUUCUUUUUCUGU | 1426 | (TGG) | 20(C8) | SpBE3 |
| | | UAUCUUCUUUUUCUGUUGGU | 1427 | (TGAAAT) | 20(C4) | KKH-SaBE3 |
| | | AAUACUUAUCUUCUUUUUCU | 1428 | (GTTGGT) | 20(C10) | KKH-SaBE3 |
| donor, | CTCGACCAGGGgtaaaaaaatata | UUUACCCCUGGUCGAGGAAU | 1429 | (TGG) | 20(C10/11) | SpBE3 |
| intron 25 | (SEQ ID NO: 1500) | AUUUUUUUACCCCUGGUCGA | 1430 | (GGAA) | 20(C9/10) | VQR-SpBE3 |
| | | UAUUUUUUUACCCCUGGUCG | 1431 | (AGG) | 20(C5/6) | SpBE3 |
| | | AUAUUUUUUUACCCCUGGUC | 1432 | (GAG) | 20(C10/11) | SpBE3 |
| | | UAUAUUUUUUUACCCCUGGU | 1433 | (CGAG) | 20(C11/12) | EQR-SpBE3 |
| | | UAUUUUUUUACCCCUGGUCG | 1434 | (AGGAAT) | 20(C12/13) | SaBE3 |
| acceptor, | cttatttctttgcagAACAAAAT | UUUUGUUCUGCAAAGAAAUA | 1435 | (AGAA) | 20(C13/14) | VQR-SpBE3 |
| intron 25 | (SEQ ID NO: 1501) | AUUUUGUUCUGCAAAGAAAU | 1436 | (AAG) | 20(C11/12) | SpBE3 |
| | | UUGUUCUGCAAAGAAAUAAG | 1437 | (AATAAT) | 20(C8) | KKH-SaBE3 |
| | | AUUUUGUUCUGCAAAGAAAU | 1438 | (AAGAAT) | 20(C9) | SaBE3 |
| | | CCUUGGAUUUUGUUCUGCAA | 1439 | (AGAAAT) | 20(C6) | KKH-SaBE3 |
| | | GAUUUUGUUCUGCAAAGAAA | 1440 | (TAAGAAT) | 20(C9) | St1BE3 |
| donor, | CTCCATTGTAGgtaagaatattt | AAUAUUCUUACCUACAAUGG | 1441 | (AGAT) | 20(C15) | VQR-SpBE3 |
| intron 26 | (SEQ ID NO: 1502) | AAAUAUUCUUACCUACAAUG | 1442 | (GAG) | 20(C10) | SpBE3 |
| | | UAAAUAUUCUUACCUACAAU | 1443 | (GGAG) | 20(C11/12) | EQR-SpBE3 |
| | | AUAUUCUUACCUACAAUGGA | 1444 | (GATAAT) | 20(C12/13) | KKH-SaBE3 |
| | | UAAAUAUUCUUACCUACAAU | 1445 | (GGAGAT) | 20(C13/14) | KKH-SaBE3 |
| | | AUAAAUAUUCUUACCUACAA | 1446 | (TGGAG) | 20(C10/11) | St3BE3 |
| acceptor, | ctccacatacagGTATGTTTCTAG | CUGUAUGUGGAGGAAAAUAA | 1447 | (TAG) | 20(C13/14) | SpBE3 |
| intron 26 | (SEQ ID NO: 1503) | GAAACAUACCUGUAUGUGGA | 1448 | (GGAA) | 20(C14/15) | VQR-SpBE3 |
| | | AGAAACAUACCUGUAUGUGG | 1449 | (AGG) | 20(C1) | SpBE3 |
| | | UAGAAACAUACCUGUAUGUG | 1450 | (GAG) | 20(C10) | SpBE3 |
| | | CUAGAAACAUACCUGUAUGU | 1451 | (GGAG) | 20(C11) | EQR-SpBE3 |
| | | CAUACCUGUAUGUGGAGGAA | 1452 | (AATAAT) | 20(C12) | KKH-SaBE3 |
| | | AAACAUACCUGUAUGUGGAG | 1453 | (GAAAAT) | 20(C13) | KKH-SaBE3 |
| | | CCUGUAUGUGGAGGAAAAUA | 1454 | (ATAGAAA) | 20(C6) | St1BE3 |
| | | GCUAGAAACAUACCUGUAUG | 1455 | (TGGAG) | 20(C9) | St3BE3 |
| | | CUAGAAACAUACCUGUAUGU | 1456 | (GGAG) | 20(C2) | EQR-SpBE3 |

^{a}BE types: SpBE3 = APOBEC1-SpCas9n-UGI; VQR-SpBE3 = APOBEC1-VQR-SpCas9n-UGI; EQR-SpBE3 = APOBEC1-EQR-SpCas9n-UGI; VRER-SpBE3 = APOBEC1-VRER-SpCas9n-UGI; SaBE3 = APOBEC1-SaCas9n-UGI; KKH-SaBE3 = APOBEC1-KKH-SaCas9n-UGI; St3BE3 = APOBEC1-St3Cas9n-UGI; St1BE3 = APOBEC1-St1Cas9n-UGI. *Isoform 2 is expressed preferentially in the dorsal root ganglion.

Scoring of Guide RNA Sequences for Efficient Base Editing with High Specificity and Low Off-Target Binding

[0109] To achieve efficient and specific genome modifications using base editing requires judicious selection of a genomic sequence containing a target C, for which a specific complementary guide RNA sequence can be generated, and if required, a nearby PAM that matches the DNA-binding domain that is fused to the cytidine deaminase (e.g. Cas9, dCas9, Cas9n, Cpf1, NgAgo, etc.), as described in Komor et al., Nature, 533, 420-424 (2016), which is incorporated herein by reference. The guide RNA sequence and PAM preference define the genomic target sequence(s) of programmable DNA-binding domains (e.g. Cas9, dCas9, Cas9n, Cpf1, NgAgo, etc.). Because of the repetitive nature of some genomic sequences as well as the stochastic frequency of representation of short sequences throughout the genome it is necessary to identify guide RNAs for programming base editors that have the lowest number of potential off target sites, taking into consideration 1, 2, 3, 4, or more mismatches against all other sequences in the genome as described in Hsu et al (Nature Biotechnology, 2013, 31(9):827-832), Fusi et al. (bioRxiv 021568; doi: http://dx.doi.org/10.1101/021568), Chari et al. (Nature Methods, 2015, 12(9):823-6), Doench et al. (Nature Biotechnology, 2014, 32(12):1262-7), Wang et al. (Science, 2014, 343(6166): 80-4), Moreno-Mateos et al (Nature Methods, 2015, 12(10):982-8), Housden et al. (Science Signaling, 2015, 8(393):rs9), Haeussler et al., (Genome Biol. 2016; 17: 148), each of which is incorporated herein by reference. The potential for the formation of bulges between the guide RNA and the target DNA may also be considered as described in Bae et al. (Bioinformatics, 2014, 30, 1473-5), which is incorporated herein by reference. Non-limiting examples of calculated specificity scores for selected guide RNAs are shown in Tables 7-9. Other calculated parameters that may influence DNA-binding domains programming efficiency are shown, as described in Housden et al. (Science Signaling, 2015, 8(393):rs9), Farboud et al. (Genetics, 2015, 199(4):959-71), each of which is incorporated herein by reference.

TABLE 7
Exemplary Efficiency and Specificity Scores for gRNAs for NaV1.7 (SCN9A) Protective Loss-of-Function Mutations via
Premature Stop Codons

| | | Programmable | SEQ | | | | | | | | | | | Pro | |
|---|---|---|---|---|---|---|---|---|---|---|---|---|---|---|---|
| Target | BE | guide-RNA | ID | | gRNA size | | | | | | | M.- | Hous- | x/ | Off |
| variants | type^{a} | sequence | NOs | PAM | (C edited) | Eff^{b} | Hsu^{c} | Fusi | Chari | Doench | Wang | M. | den | GC | targets^{d} |
| Q687X | EQR- | CAACCUCAGACAG | 1504 | (TGAG) | 20 (C7) | 5.4 | 99 | 62 | 92 | 19 | 80 | 35 | 5 | - | 0-0-0-0- |
| | SpBE3 | AGAGCAA | | | | | | | | | | | | | 8 |
| Q687X | KKH- | GAUCCCAACCUCA | 1505 | (AGCAAT) | 20 (C12) | 6.2 | 92 | 66 | 99 | 39 | 77 | 26 | 6 | - | 0-0-0-2- |
| | SaBE3 | GACAGAG | | | | | | | | | | | | | 13 |
| W1245X | KKH- | AAAUCCAGCCAAC | 1506 | (ATTGGT) | 20 (C14/8) | 6.6 | 96 | 50 | 95 | 10 | 84 | 36 | 6 | + | 0-0-0-0- |
| | SaBE3 | ACCAGGC | | | | | | | | | | | | | 8 |
| Q323X | SaBE3 | CGUGUGUAGUCAG | 1507 | (AGGGGT) | 20 (C11) | 8.2 | 96 | 60 | 93 | 36 | 78 | 69 | 8 | + | 0-0-0-2- |
| | | UGUCCAG | | | | | | | | | | | | | 5 |
| Q323X | St3BE3 | CGUGUGUAGUCAG | 1508 | (AGGGG) | 20 (C11) | 8.2 | 96 | 60 | 93 | 36 | 78 | 69 | 8 | + | 0-0-0-1- |
| | | UGUCCAG | | | | | | | | | | | | | 16 |
| W188X | SpBE3 | GUUCCACGGGUCA | 1509 | (AAG) | 20 (C5) | 5.3 | 95 | 51 | 92 | 13 | 55 | 51 | 5 | - | 0-0-0-2- |
| | | CGAAGAA | | | | | | | | | | | | | 45 |
| Q1494X | SpBE3 | AAAGCCAAUUCCU | 1510 | (GGG) | 20 (C-2) | 4.9 | 88 | 68 | 96 | 40 | 84 | 64 | 4 | + | 0-0-1-9- |
| | | CGACCAG | | | | | | | | | | | | | 68 |
| R835X | KKH- | UCAGUUCUGCGAU | 1511 | (ACTGGT) | 20 (C10) | 6.8 | 98 | 60 | 85 | 51 | 71 | 58 | 6 | - | 0-0-0-0- |
| | SaBE3 | CAUUCAG | | | | | | | | | | | | | 5 |
| R841X | KKH- | GCUCCGAGUCUUC | 1512 | (CAAAAT) | 20 (C5) | 6.6 | 98 | 51 | 84 | 63 | 66 | 58 | 6 | - | 0-0-0-1- |
| | SaBE3 | AAGUUGG | | | | | | | | | | | | | 3 |
| Q485X | St3BE3 | AAUCAAAAGAAGC | 1513 | (TGGAG) | 20 (C4) | 7.5 | 94 | 61 | 87 | 24 | 85 | 50 | 7 | + | 0-0-0-1- |
| | | UCUCCAG | | | | | | | | | | | | | 38 |
| Q643X | KKH- | AAUGGACAGCUUC | 1514 | (GGTGAT) | 20 (C7) | 9.9 | 95 | 60 | 85 | 65 | 67 | 54 | 9 | + | 0-0-0-2- |
| | SaBE3 | UGCCAGA | | | | | | | | | | | | | 8 |
| W730X | KKH- | GAAUUUUAUCCAA | 1515 | (AGCAAT) | 20 (C11) | 6.6 | 94 | 60 | 84 | 20 | 88 | 21 | 6 | - | 0-0-0-1- |
| | SaBE3 | UAUGGAG | | | | | | | | | | | | | 17 |
| Q1862X | KKH- | UCUUCGUUCACAG | 1516 | (AAAGGT) | 20 (C11) | 4.8 | 92 | 54 | 85 | 40 | 70 | 32 | 4 | - | 0-0-0-2- |
| | SaBE3 | AUGGAAG | | | | | | | | | | | | | 44 |
| Q595X | St3BE3 | GUUUGUGCCCCAC | 1517 | (AGGAG) | 20 (C13) | 7.0 | 90 | 55 | 86 | 45 | 74 | 38 | 7 | + | 0-0-0-3- |
| | | AGACCCC | | | | | | | | | | | | | 38 |
| W151X | SpBE3 | ACAUUUUUGGUCC | 1518 | (TGG) | 20 (C13) | 4.9 | 87 | 51 | 88 | 39 | 84 | 46 | 4 | + | 0-0-1-5- |
| | | AGUCCGG | | | | | | | | | | | | | 85 |
| R523X | SpBE3 | AUAGGCGAGCACA | 1519 | (AGG) | 20 (C6) | 10.6 | 78 | 61 | 96 | 75 | 78 | 58 | 10 | - | 0-0-0-5- |
| | | UGAAAAG | | | | | | | | | | | | | 86 |
| Q534X | KKH- | UACCCCCAAUCAG | 1520 | (CCAAAT) | 20 (C11) | 4.7 | 96 | 56 | 77 | 5 | 47 | 48 | 4 | - | 0-0-0-0- |
| | SaBE3 | GUACCAC | | | | | | | | | | | | | 3 |
| W714X | SpBE3 | GCAAAUCUGUACC | 1521 | (TGG) | 20 (C13) | 5.2 | 73 | 71 | 99 | 59 | 85 | 57 | 5 | + | 0-0-1- |
| | | ACCAAGG | | | | | | | | | | | | | 14-113 |
| Q1494X | SpBE3 | AAAAGCCAAUUCC | 1522 | (GGG) | 20 (C-1) | 6.0 | 87 | 61 | 85 | 14 | 64 | 56 | 6 | + | 0-0-2- |
| | | UCGACCA | | | | | | | | | | | | | 12-86 |
| W188X | SaBE3 | UCCACGGGUCACG | 1523 | (GTGAAT) | 20 (C3) | 6.9 | 96 | 56 | 75 | 55 | 51 | 57 | 6 | - | 0-0-0-0- |
| | | AAGAAAA | | | | | | | | | | | | | 4 |
| W1245X | KKH- | CAGCCAACACCAG | 1524 | (TGAAAT) | 20 (C9/3) | 7.0 | 91 | 50 | 80 | 9 | 60 | 48 | 7 | - | 0-0-0-1- |
| | SaBE3 | GCAUUGG | | | | | | | | | | | | | 16 |
| W188X | KKH- | CAGUUCCACGGGU | 1525 | (AAAAGT) | 20 (C7/1) | 4.3 | 99 | -1 | 71 | 22 | 66 | 65 | 4 | - | 0-0-0-0- |
| | SaBE3 | CACGAAG | | | | | | | | | | | | | 14 |
| Q595X | SpBE3 | CACAGACCCCAGG | 1526 | (CAG) | 20 (C3) | 7.7 | 75 | 61 | 95 | 65 | 87 | 69 | 5 | + | 0-0-4- |
| | | AGCGACG | | | | | | | | | | | | | 22-140 |
| Q1004X | VQR- | UAUGUGAAACAAA | 1527 | (TGAA) | 20 (C10) | 7.2 | 80 | 60 | 90 | 35 | 71 | 16 | 7 | - | 0-0-1- |
| | SpBE3 | CCUUACG | | | | | | | | | | | | | 10-146 |
| W1578X | KKH- | AAAAAUAUUCCAU | 1528 | (TGAAGT) | 20 (C11) | 5.2 | 86 | 62 | 83 | 13 | 81 | 35 | 5 | - | 0-0-0-4- |
| | SaBE3 | CCUACAG | | | | | | | | | | | | | 22 |
| Q368/9X | St1BE3 | UUACCAACAGGUG | 1529 | (AGAGAAA) | 20 (C5) | 4.3 | 98 | 66 | 70 | 50 | 59 | 38 | 4 | - | 0-0-0-0- |
| | | AGUACCA | | | | | | | | | | | | | 18 |
| Q369X | St1BE3 | UUACCAACAGGUG | 1530 | (AGAGAAA) | 20 (C8) | 4.3 | 98 | 66 | 70 | 50 | 59 | 38 | 4 | - | 0-0-0-0- |
| | | AGUACCA | | | | | | | | | | | | | 18 |
| W188X | VQR- | GCCAGUUCCACGG | 1531 | (AGAA) | 20 (C9/3) | 2.9 | 91 | 63 | 75 | 38 | 77 | 46 | 2 | - | 0-0-3-0- |
| | SpBE3 | GUCACGA | | | | | | | | | | | | | 33 |
| W151X | SaBE3 | GACAUUUUUGGUC | 1532 | (GTGGGT) | 20 (C14) | 3.6 | 99 | 49 | 66 | 27 | 69 | 52 | 3 | + | 0-0-0-0- |
| | | CAGUCCG | | | | | | | | | | | | | 4 |
| W1332X | KKH- | UCAGCCAGAAUAU | 1533 | (ACAAGT) | 20 (C6) | 3.6 | 92 | 67 | 73 | 51 | 78 | 51 | 3 | - | 0-0-0-2- |
| | SaBE3 | AAGACAC | | | | | | | | | | | | | 18 |
| W908X | KKH- | CAUGUGCCACCGU | 1534 | (TACAGT) | 20 (C8) | 6.3 | 92 | 59 | 72 | 5 | 58 | 56 | 6 | + | 0-0-0-2- |
| | SaBE3 | GGGAGCG | | | | | | | | | | | | | 8 |
| Q534X | KKH- | AUCAGGUACCACC | 1535 | (CTAAAT) | 20 (C3) | 6.2 | 99 | 59 | 63 | 16 | 64 | 42 | 6 | - | 0-0-0-0- |
| | SaBE3 | CAAAUUG | | | | | | | | | | | | | 5 |
| Q1004X | SaBE3 | UUAUGUGAAACAA | 1536 | (GTGAAT) | 20 (C11) | 4.8 | 96 | 44 | 65 | 13 | 28 | 37 | 4 | - | 0-0-0-2- |
| | | ACCUUAC | | | | | | | | | | | | | 21 |
| Q1907X | KKH- | ACCGCUUAAGGCA | 1537 | (AAAAAT) | 20 (C12) | 3.9 | 98 | 49 | 62 | 3 | 35 | 44 | 3 | - | 0-0-0-1- |
| | SaBE3 | AAAUGUC | | | | | | | | | | | | | 3 |
| Q663X | St1BE3 | GGCACGACCAAUC | 1538 | (CAAGAAA) | 20 (C9) | 4.4 | 96 | 63 | 58 | 29 | 72 | 27 | 4 | - | 0-0-0-1- |
| | | AAAUACA | | | | | | | | | | | | | 13 |
| R1381X | KKH- | AAUGUGCGAUGGA | 1539 | (GAAAGT) | 20 (C7) | 4.0 | 91 | 67 | 68 | 49 | 81 | 64 | 4 | - | 0-0-0-2- |
| | SaBE3 | AAAACCU | | | | | | | | | | | | | 17 |
| R1619X | St3BE3 | CGAAUCCUACGUC | 1540 | (AGGAG) | 20 (C1) | 8.5 | 99 | 60 | 54 | 32 | 49 | 54 | 8 | - | 0-0-3-0- |
| | | UAGUCAA | | | | | | | | | | | | | 0 |
| Q58X | St3BE3 | AAACAGCUGCCCU | 1541 | (TGGGG) | 20 (C4) | 8.4 | 96 | 26 | 61 | 3 | 53 | 35 | 8 | - | 0-0-0-3- |
| | | UCAUCUA | | | | | | | | | | | | | 29 |
| Q708X | St3BE3 | CCAGACAAAAAUG | 1542 | (TGGTG) | 20 (C6) | 7.2 | 90 | 67 | 55 | 13 | 73 | 47 | 7 | + | 0-0-1-4- |
| | | UCCACCU | | | | | | | | | | | | | 35 |
| Q25X | St1BE3 | CAUUGAACAACGC | 1543 | (AAAGAAA) | 20 (C8) | 3.8 | 97 | 59 | 59 | 27 | 79 | 26 | 3 | - | 0-0-0-0- |
| | | AUUGCUG | | | | | | | | | | | | | 16 |
| Q1971X | St1BE3 | AGAAAUAUGAACA | 1544 | (ACAGAAA) | 20 (C12) | 5.8 | 64 | 53 | 92 | 13 | 80 | 17 | 5 | - | 0-0-0- |
| | | AGACAGA | | | | | | | | | | | | | 20-242 |
| Q240X | St1BE3 | GGGGCUUUGAUCC | 1545 | (GAAGAAG) | 20 (C13) | 5.4 | 95 | 60 | 50 | 8 | 62 | 48 | 5 | - | 0-0-1-3- |
| | | AGUCAGU | | | | | | | | | | | | | 11 |
| Q595X | KKH- | ACAGACCCCAGGA | 1546 | (AGCAGT) | 20 (C2) | 4.3 | 97 | 52 | 58 | 14 | 77 | 55 | 4 | + | 0-0-0-2- |
| | SaBE3 | GCGACGC | | | | | | | | | | | | | 12 |
| R597X | SpBE3 | GAGCGACGCAGCA | 1547 | (CAG) | 20 (C4) | 4.1 | 91 | 64 | 58 | 48 | 76 | 63 | 4 | - | 0-0-1-0- |
| | | GUAACAU | | | | | | | | | | | | | 43 |
| R1619X | SpBE3 | CGAAUCCUACGUC | 1548 | (AGG) | 20 (C1) | 8.5 | 95 | 60 | 54 | 32 | 49 | 54 | 8 | - | 0-0-3-1- |
| | | UAGUCAA | | | | | | | | | | | | | 12 |
| R1619X | EQR- | GAAUCCUACGUCU | 1549 | (GGAG) | 20 (C-1) | 4.1 | 78 | 47 | 76 | 19 | 45 | 27 | 4 | - | 0-0-3-9- |
| | SpBE3 | AGUCAAA | | | | | | | | | | | | | 62 |
| Q663X | SpBE3 | GCACGACCAAUCA | 1550 | (AAG) | 20 (C8) | 3.3 | 86 | 67 | 54 | 68 | 77 | 37 | 3 | - | 0-0-0-3- |
| | | AAUACAC | | | | | | | | | | | | | 36 |
| Q1539/ | KKH- | GGUCAAAGUCAAC | 1551 | (TGAAGT) | 20 (C4/10) | 6.7 | 90 | 56 | 63 | 22 | 57 | 14 | 6 | - | 0-0-1-1- |
| 41X | SaBE3 | AUAUGAC | | | | | | | | | | | | | 6 |
| Q604X | SpBE3 | GUAACAUCAGCCA | 1552 | (AGG) | 20 (C12) | 3.8 | 68 | 61 | 84 | 76 | 61 | 33 | 3 | + | 0-0-2- |
| | | AGCCAGU | | | | | | | | | | | | | 14-105 |
| W1161X | SpBE3 | ACCUCCAUACACA | 1553 | (AAG) | 20 (C6) | 7.5 | 82 | 54 | 70 | 28 | 27 | 35 | 7 | + | 0-0-2-5- |
| | | ACCUGAC | | | | | | | | | | | | | 85 |
| Q1378X | SpBE3 | AUGUUAGUCAAAA | 1554 | (TGG) | 20 (C9) | 6.6 | 87 | 65 | 46 | 53 | 89 | 30 | 6 | + | 0-0-1-7- |
| | | UGUGCGA | | | | | | | | | | | | | 78 |
| W1786X | KKH- | CCAAACCUCAUAG | 1555 | (CAAAGT) | 20 (C2) | 4.4 | 91 | 61 | 52 | 20 | 51 | 34 | 4 | - | 0-0-0-4- |
| | SaBE3 | AACAUCU | | | | | | | | | | | | | 16 |
| R277X | KKH- | GUUUUCGAAAUUC | 1556 | (AATAAT) | 20 (C6) | 5.3 | 90 | 50 | 61 | 8 | 46 | 37 | 5 | - | 0-0-0-6- |
| | SaBE3 | ACUUGAA | | | | | | | | | | | | | 48 |
| Q604X | KKH- | AGCCAAGCCAGUA | 1557 | (ACCAAT) | 20 (C4) | 4.8 | 97 | 54 | 25 | 7 | 48 | 38 | 4 | + | 0-0-0-0- |
| | SaBE3 | GGUCCCC | | | | | | | | | | | | | 8 |
| Q643X | St3BE3 | CAAUGGACAGCUU | 1558 | (AGGTG) | 20 (C8) | 4.2 | 90 | 61 | 61 | 15 | 67 | 54 | 4 | + | 0-0-0-5- |
| | | CUGCCAG | | | | | | | | | | | | | 32 |
| W151X | SpBE3 | CAUUUUUGGUCCA | 1559 | (GGG) | 20 (C12) | 4.8 | 94 | 56 | 46 | 36 | 38 | 48 | 4 | + | 0-0-0-1- |
| | | GUCCGGU | | | | | | | | | | | | | 48 |
| W188X | St1BE3 | CAGCCAGUUCCAC | 1560 | (GAAGAAA) | 20 (C11/5) | 6.9 | 98 | 42 | 52 | 1 | 27 | 59 | 6 | + | 0-0-1-0- |
| | | GGGUCAC | | | | | | | | | | | | | 11 |
| Q687X | SaBE3 | CCAACCUCAGACA | 1561 | (ATGAGT) | 20 (C8) | 3.7 | 86 | 59 | 64 | 38 | 61 | 44 | 3 | - | 0-0-0-3- |
| | | GAGAGCA | | | | | | | | | | | | | 19 |
| Q1363X | SaBE3 | AAGUCAAGUUCCA | 1562 | (CCGAAT) | 20 (C5) | 4.1 | 99 | 51 | 28 | 26 | 49 | 58 | 4 | - | 0-0-0-0- |
| | | AAUCGUU | | | | | | | | | | | | | 7 |
| Q1378X | VQR- | UGUUAGUCAAAAU | 1563 | (GGAA) | 20 (C8) | 4.3 | 89 | 61 | 15 | 9 | 41 | 48 | 4 | - | 0-0-0-6- |
| | SpBE3 | GUGCGAU | | | | | | | | | | | | | 85 |
| Q1515X | KKH- | ACCUAGUGACAAA | 1564 | (TTTGAT) | 20 (C10) | 7.6 | 93 | 47 | 57 | 11 | 60 | 1 | 7 | + | 0-0-0-1- |
| | SaBE3 | UCAAGCC | | | | | | | | | | | | | 9 |
| R1499X | KKH- | AAUUCCUCGACCA | 1565 | (AAAAAT) | 20 (C8) | 5.6 | 99 | 50 | 33 | 10 | 43 | 54 | 5 | - | 0-0-0-0- |
| | SaBE3 | GGGGUAA | | | | | | | | | | | | | 2 |
| Q643X | KKH- | cCCAAUGGACAGC | 1566 | (AGAGGT) | 20 (C10) | 7.9 | 88 | 36 | 60 | 11 | 35 | 34 | 7 | + | 0-0-2-1- |
| | SaBE3 | UUCUGCC | | | | | | | | | | | | | 10 |
| Q989X | St1BE3 | CAACCUCCAGAUU | 1567 | (CTAGAAT) | 20 (C8) | 4.5 | 93 | 54 | 21 | 6 | 65 | 41 | 4 | - | 0-0-1-2- |
| | | GCAGUGA | | | | | | | | | | | | | 15 |
| Q1167X | SaBE3 | CUCAUGCUGCCAA | 1568 | (TAGAGT) | 20 (C11) | 6.1 | 93 | 54 | 46 | 11 | 31 | 14 | 6 | - | 0-0-0-0- |
| | | GUUAACA | | | | | | | | | | | | | 19 |
| W1408X | KKH- | AUAAUAAUCGUCC | 1569 | (AAAAGT) | 20 (C13) | 4.1 | 94 | 51 | 53 | 62 | 46 | 41 | 4 | - | 0-0-0-0- |
| | SaBE3 | AUCCCUU | | | | | | | | | | | | | 20 |
| Q58X | SpBE3 | ACAGCUGCCCUUC | 1570 | (GGG) | 20 (C2) | 6.7 | 69 | 71 | 77 | 39 | 52 | 44 | 6 | - | 0-0-4- |
| | | AUCUAUG | | | | | | | | | | | | | 19-191 |
| R523X | SpBE3 | GGCAUAGGCGAGC | 1571 | (AAG) | 20 (C9) | 5.0 | 69 | 57 | 77 | 23 | 58 | 51 | 5 | - | 0-0-2- |
| | | ACAUGAA | | | | | | | | | | | | | 14-83 |
| R548X | KKH- | CUGCAAGGCGAAG | 1572 | (ACAAGT) | 20 (C9) | 5.2 | 74 | 56 | 72 | 35 | 65 | 75 | 5 | - | 0-0-1-2- |
| | SaBE3 | CAGCAGA | | | | | | | | | | | | | 27 |
| Q663X | St3BE3 | CCAAUCAAAUACA | 1573 | (AGGCG) | 20 (C2) | 4.5 | 82 | 47 | 64 | 11 | 71 | 28 | 4 | - | 0-0-0-7- |
| | | CAAGAAA | | | | | | | | | | | | | 63 |
| W1700X | KKH- | CCAUCCCAGCCAG | 1574 | (TGTAAT) | 20 (C7) | 7.3 | 79 | 54 | 67 | 10 | 58 | 35 | 7 | - | 0-0-0-2- |
| | SaBE3 | CAGAGGU | | | | | | | | | | | | | 35 |
| R523X | KKH- | GCAUAGGCGAGCA | 1575 | (AGAGGT) | 20 (C8) | 4.3 | 92 | 48 | 53 | 23 | 83 | 41 | 4 | - | 0-0-0-2- |
| | SaBE3 | CAUGAAA | | | | | | | | | | | | | 9 |
| R835X | SpBE3 | AGUUCUGCGAUCA | 1576 | (TGG) | 20 (C8) | 7.1 | 81 | 64 | 33 | 20 | 51 | 32 | 7 | - | 0-0-1-5- |
| | | UUCAGAC | | | | | | | | | | | | | 42 |
| R548X | KKH- | GAAGCAGCAGAAC | 1577 | (TTTAGT) | 20 (C-1) | 4.4 | 86 | 39 | 58 | 24 | 69 | 52 | 4 | - | 0-0-0-4- |
| | SaBE3 | AAGUCUU | | | | | | | | | | | | | 12 |
| Q360X | SpBE3 | GCUAAUGACCCAA | 1578 | (GGG) | 20 (C11) | 6.0 | 71 | 55 | 72 | 25 | 36 | 15 | 6 | - | 0-0-3-8- |
| | | GAUUACU | | | | | | | | | | | | | 74 |
| Q643X | KKH- | GGACAGCUUCUGC | 1579 | (GATAAT) | 20 (C4) | 5.1 | 81 | 62 | 40 | 20 | 75 | 46 | 5 | - | 0-0-0-5- |
| | SaBE3 | CAGAGGU | | | | | | | | | | | | | 14 |
| R1381X | VQR- | GUGCGAUGGAAAA | 1580 | (AGTG) | 20 (C4) | 5.5 | 59 | 58 | 84 | 4 | 59 | 48 | 5 | - | 0-0-1- |
| | SpBE3 | ACCUGAA | | | | | | | | | | | | | 21-169 |
| W1578X | KKH- | AAUAUUCCAUCCU | 1581 | (AGTAGT) | 20 (C8) | 4.1 | 83 | 60 | 44 | 13 | 74 | 43 | 4 | - | 0-0-2-3- |
| | SaBE3 | ACAGUGA | | | | | | | | | | | | | 37 |
| Q25X | VQR- | UUGAACAACGCAU | 1582 | (AGAA) | 20 (C6) | 6.0 | 54 | 59 | 88 | 16 | 31 | 43 | 6 | - | 0-0-1- |
| | SpBE3 | UGCUGAA | | | | | | | | | | | | | 31-326 |
| Q368/9X | EQR- | UUACCAACAGGUG | 1583 | (AGAG) | 20 (C5) | 4.3 | 72 | 66 | 70 | 50 | 59 | 38 | 4 | - | 0-0-1- |
| | SpBE3 | AGUACCA | | | | | | | | | | | | | 13-111 |
| Q369X | EQR- | UUACCAACAGGUG | 1584 | (AGAG) | 20 (C8) | 4.3 | 72 | 66 | 70 | 50 | 59 | 38 | 4 | - | 0-0-1- |
| | SpBE3 | AGUACCA | | | | | | | | | | | | | 13-111 |
| Q941X | VQR- | GGAGGUCGCUGGU | 1585 | (TGTG) | 20 (C14) | 3.8 | 91 | 43 | 51 | 15 | 82 | 53 | 3 | - | 0-0-0-2- |
| | SpBE3 | CAAGCUA | | | | | | | | | | | | | 44 |
| Q1167X | SpBE3 | GCCAAGUUAACAU | 1586 | (GGG) | 20 (C3) | 2.9 | 76 | 65 | 66 | 60 | 74 | 29 | 2 | - | 0-0-0- |
| | | AGAGUCA | | | | | | | | | | | | | 13-103 |
| Q989X | SaBE3 | AACCUCCAGAUUG | 1587 | (TAGAAT) | 20 (C7) | 6.3 | 92 | 49 | 11 | 3 | 24 | 44 | 6 | - | 0-0-1-1- |
| | | CAGUGAC | | | | | | | | | | | | | 9 |
| W1578X | KKH- | AUUCCAUCCUACA | 1588 | (AGTAGT) | 20 (C5) | 4.4 | 89 | 51 | 15 | 15 | 37 | 35 | 4 | - | 0-0-0-1- |
| | SaBE3 | GUGAAGU | | | | | | | | | | | | | 20 |
| Q708X | SpBE3 | GACAAAAAUGUCC | 1589 | (TGG) | 20 (C3) | 3.9 | 47 | 55 | 92 | 17 | 67 | 56 | 3 | + | 0-0-3- |
| | | ACCUUGG | | | | | | | | | | | | | 25-208 |
| Q708X | KKH- | GUCCAGACAAAAA | 1590 | (CTTGGT) | 20 (C8) | 6.0 | 76 | 54 | 63 | 28 | 71 | 34 | 6 | + | 0-0-0- |
| | SaBE3 | UGUCCAC | | | | | | | | | | | | | 12-58 |
| W724X | KKH- | UCCAGAUCAAGAA | 1591 | (GCAAAT) | 20 (C3) | 4.9 | 79 | 60 | 6 | 17 | 56 | 24 | 4 | - | 0-0-2-3- |
| | SaBE3 | UUUGUGU | | | | | | | | | | | | | 32 |
| Q805X | SaBE3 | AUGAGUAUUUCCA | 1592 | (TGGAAT) | 20 (C12) | 4.4 | 88 | 51 | 39 | 7 | 51 | 32 | 4 | + | 0-0-1-4- |
| | | AGUAGGC | | | | | | | | | | | | | 12 |
| Q485X | EQR- | CAAAAGAAGCUCU | 1593 | (AGAG) | 20 (C1) | 6.8 | 62 | 57 | 75 | 5 | 83 | 50 | 6 | + | 0-0-2- |
| | SpBE3 | CCAGUGG | | | | | | | | | | | | | 19-210 |
| W1245X | St1BE3 | AUAACCAUAUGCU | 1594 | (TTAGAAG) | 20 (C17) | 4.5 | 89 | 41 | 48 | 51 | 23 | 22 | 4 | - | 0-0-2-3- |
| | | AUCCAUU | | | | | | | | | | | | | 17 |
| Q1505X | KKH- | AUCCAAGGAUGUA | 1595 | (CCTAGT) | 20 (C4) | 5.8 | 87 | 50 | 20 | 16 | 29 | 44 | 5 | - | 0-0-0-4- |
| | SaBE3 | UAUUUGA | | | | | | | | | | | | | 32 |
| Q1363X | VQR- | AGUCAAGUUCCAA | 1596 | (CGAA) | 20 (C4) | 6.2 | 88 | 48 | 19 | 32 | 44 | 29 | 6 | - | 0-0-1-4- |
| | SpBE3 | AUCGUUC | | | | | | | | | | | | | 92 |
| Q58X | SpBE3 | AAACAGCUGCCCU | 1597 | (TGG) | 20 (C4) | 8.4 | 74 | 26 | 61 | 3 | 53 | 35 | 8 | - | 0-0-2- |
| | | UCAUCUA | | | | | | | | | | | | | 12-147 |
| Q368/9X | SpBE3 | UUUACCAACAGGU | 1598 | (AAG) | 20 (C6) | 4.8 | 81 | 54 | 44 | 5 | 23 | 34 | 4 | - | 0-0-1-9- |
| | | GAGUACC | | | | | | | | | | | | | 88 |
| Q1401X | KKH- | AAGGCAACUUUUA | 1599 | (GACGAT) | 20 (C5) | 5.2 | 83 | 52 | 38 | 2 | 62 | 62 | 5 | + | 0-0-1-6- |
| | SaBE3 | AGGGAUG | | | | | | | | | | | | | 28 |
| Q1515X | KKH- | UGACAAAUCAAGC | 1600 | (ATTAGT) | 20 (C4) | 4.2 | 92 | 43 | 14 | 32 | 34 | 29 | 4 | - | 0-0-0-1- |
| | SaBE3 | CUUUGAU | | | | | | | | | | | | | 18 |
| Q643X | KKH- | AGCUUCUGCCAGA | 1601 | (ATAGAT) | 20 (C-1) | 6.7 | 94 | 40 | 24 | 1 | 30 | 23 | 6 | - | 0-0-0-3- |
| | SaBE3 | GGUGAUA | | | | | | | | | | | | | 16 |
| Q25X | KKH- | UGAACAACGCAUU | 1602 | (GAAAAT) | 20 (C5) | 7.6 | 88 | 45 | 12 | 7 | 47 | 41 | 7 | - | 0-0-0-3- |
| | SaBE3 | GCUGAAA | | | | | | | | | | | | | 14 |
| Q368/9X | SpBE3 | UACCAACAGGUGA | 1603 | (GAG) | 20 (C4) | 4.2 | 71 | 58 | 62 | 27 | 54 | 63 | 4 | - | 0-0-1- |
| | | GUACCAA | | | | | | | | | | | | | 10-123 |
| Q369X | SpBE3 | UACCAACAGGUGA | 1604 | (GAG) | 20 (C7) | 4.2 | 71 | 58 | 62 | 27 | 54 | 63 | 4 | - | 0-0-1- |
| | | GUACCAA | | | | | | | | | | | | | 10-123 |
| W908X | VRER- | CGUUCAUGUGCCA | 1605 | (AGCG) | 20 (C12) | 4.8 | 50 | 52 | 83 | 6 | 55 | 56 | 4 | + | 1-0-0-0- |
| | SpBE3 | CCGUGGG | | | | | | | | | | | | | 1 |
| W1161X | St1BE3 | AACCUCCAUACAC | 1606 | (CAAGAAA) | 20 (C7) | 3.4 | 49 | 61 | 84 | 25 | 77 | 29 | 3 | - | 1-0-0-0- |
| | | AACCUGA | | | | | | | | | | | | | 10 |
| W1245X | St1BE3 | UAUCCAUUUUAGA | 1607 | (CCAGAAT) | 20 (C5) | 4.5 | 49 | 61 | 84 | 25 | 77 | 29 | 3 | - | 1-0-0-0- |
| | | AGCAUUU | | | | | | | | | | | | | 10 |
| W1408X | St1BE3 | CAUCCCUUAAAAG | 1608 | (TAAGAAT) | 20 (C1) | 7.2 | 96 | 34 | 37 | 6 | 42 | 29 | 7 | - | 0-0-0-1- |
| | | UUGCCUU | | | | | | | | | | | | | 28 |
| Q1494X | SpBE3 | ACAAAAGCCAAUU | 1609 | (CAG) | 20 (C2) | 5.1 | 85 | 48 | 8 | 14 | 50 | 38 | 5 | + | 0-0-0- |
| | | CCUCGAC | | | | | | | | | | | | | 10-75 |
| Q1494X | SpBE3 | CAAAAGCCAAUUC | 1610 | (AGG) | 20 (C1) | 3.5 | 81 | 52 | 25 | 6 | 71 | 37 | 3 | + | 0-0-3- |
| | | CUCGACC | | | | | | | | | | | | | 12-94 |
| Q25X | SpBE3 | AUUGAACAACGCA | 1611 | (AAG) | 20 (C7) | 8.3 | 61 | 58 | 70 | 11 | 65 | 26 | 8 | - | 01-1- |
| | | UUGCUGA | | | | | | | | | | | | | 15-82 |
| Q1462X | St1BE3 | GAUAAUUUCAACC | 1612 | (AAAGAAG) | 20 (C9) | 3.4 | 43 | 47 | 88 | 35 | 76 | 14 | 3 | - | 0-2-2-9- |
| | | AACAGAA | | | | | | | | | | | | | 143 |
| Q240X | KKH- | UCCAGUCAGUGAA | 1613 | (TCTGAT) | 20 (C3) | 4.9 | 84 | 36 | 45 | 7 | 48 | 36 | 4 | - | 0-0-0-4- |
| | SaBE3 | GAAGCUU | | | | | | | | | | | | | 15 |
| Q408/ | St1BE3 | AACAGAACCAGGC | 1614 | (GAAGAAG) | 20 (C3/9) | 4.1 | 86 | 43 | 28 | 7 | 50 | 41 | 4 | - | 0-0-1-5- |
| 10X | | AAACAUU | | | | | | | | | | | | | 65 |
| Q643X | SpBE3 | CAAUGGACAGCUU | 1615 | (AGG) | 20 (C8) | 4.2 | 68 | 61 | 61 | 15 | 67 | 54 | 4 | + | 0-0-0- |
| | | CUGCCAG | | | | | | | | | | | | | 21-133 |
| Q708X | SpBE3 | CCAGACAAAAAUG | 1616 | (TGG) | 20 (C6) | 7.2 | 62 | 67 | 55 | 13 | 73 | 47 | 7 | + | 0-0-5- |
| | | UCCACCU | | | | | | | | | | | | | 24-165 |
| Q708X | KKH- | CAGACAAAAAUGU | 1617 | (GGTGGT) | 20 (C5) | 4.2 | 84 | 45 | 32 | 0 | 46 | 70 | 4 | - | 0-0-0-4- |
| | SaBE3 | CCACCUU | | | | | | | | | | | | | 20 |
| R841X | SpBE3 | UUAGCUCCGAGUC | 1618 | (TGG) | 20 (C8) | 6.4 | 67 | 62 | 34 | 59 | 64 | 47 | 6 | - | 0-1-0-6- |
| | | UUCAAGU | | | | | | | | | | | | | 44 |
| Q1862X | SpBE3 | UUCGUUCACAGAU | 1619 | (AGG) | 20 (C9) | 3.9 | 49 | 50 | 80 | 5 | 42 | 43 | 3 | - | 0-0-4- |
| | | GGAAGAA | | | | | | | | | | | | | 24-228 |
| W151X | SpBE3 | CCAGUCCGGUGGG | 1620 | (TGG) | 20 (C2) | 7.9 | 87 | 41 | 41 | 2 | 43 | 43 | 7 | - | 0-0-1-4- |
| | | UUAUUCA | | | | | | | | | | | | | 35 |
| R523X | EQR- | GCAUAGGCGAGCA | 1621 | (AGAG) | 20 (C8) | 4.3 | 74 | 48 | 53 | 23 | 83 | 41 | 4 | - | 0-0-0-8- |
| | SpBE3 | CAUGAAA | | | | | | | | | | | | | 92 |
| Q1470X | St1BE3 | GAGGUCAAGACAU | 1622 | (ACAGAAG) | 20 (C6) | 4.8 | 46 | 54 | 81 | 7 | 65 | 44 | 4 | - | 1-1-0-2- |
| | | CUUUAUG | | | | | | | | | | | | | 25 |
| W1578X | VQR- | CCAUCCUACAGUG | 1623 | (AGTG) | 20 (C2) | 5.2 | 78 | 48 | 35 | 25 | 37 | 44 | 5 | - | 0-0-0- |
| | SpBE3 | AAGUAGU | | | | | | | | | | | | | 17-112 |
| Q1026X | SaBE3 | AGAUAAGACAAGC | 1624 | (CTGAAT) | 20 (C9) | 4.9 | 69 | 56 | 51 | 31 | 66 | 40 | 4 | - | 0-0-1-7- |
| | | AGAAGAU | | | | | | | | | | | | | 40 |
| Q1077X | KKH- | GUGAUGGUCAAUC | 1625 | (CACAAT) | 20 (C9) | 5.2 | 90 | 35 | 9 | 26 | 28 | 44 | 5 | - | 0-0-0-2- |
| | SaBE3 | AUUUAUU | | | | | | | | | | | | | 21 |
| Q58X | SpBE3 | AACAGCUGCCCUU | 1626 | (GGG) | 20 (C3) | 6.2 | 74 | 49 | 3 | 7 | 24 | 25 | 6 | - | 0-0-1- |
| | | CAUCUAU | | | | | | | | | | | | | 10-115 |
| W151X | KKH- | GUCCAGUCCGGUG | 1627 | (CATGGT) | 20 (C4) | 4.9 | 100 | 23 | 7 | 4 | 9 | 53 | 4 | - | 0-0-0-1- |
| | SaBE3 | GGUUAUU | | | | | | | | | | | | | 0 |
| Q323X | SpBE3 | UGUGUAGUCAGUG | 1628 | (GGG) | 20 (C9) | 7.9 | 43 | 75 | 80 | 69 | 68 | 76 | 7 | + | 0-1-2-62 |
| | | UCCAGAG | | | | | | | | | | | | | 35-1 |
| Q485X | EQR- | AUCAAAAGAAGCU | 1629 | (GGAG) | 20 (C3) | 3.6 | 62 | 60 | 53 | 35 | 44 | 30 | 3 | - | 0-0-3- |
| | SpBE3 | CUCCAGU | | | | | | | | | | | | | 14-187 |
| Q1167X | SpBE3 | UGCCAAGUUAACA | 1630 | (AGG) | 20 (C4) | 6.0 | 76 | 46 | 15 | 1 | 29 | 41 | 6 | - | 0-0-2-8- |
| | | UAGAGUC | | | | | | | | | | | | | 89 |
| Q1515X | VQR- | CUAGUGACAAAUC | 1631 | (TGAT) | 20 (C8) | 4.8 | 74 | 48 | 12 | 13 | 63 | 52 | 4 | - | 0-0-0- |
| | SpBE3 | AAGCCUU | | | | | | | | | | | | | 17-129 |
| Q1167X | EQR- | UCAUGCUGCCAAG | 1632 | (AGAG) | 20 (C10) | 8.6 | 64 | 53 | 57 | 43 | 69 | 27 | 8 | - | 0-0-1- |
| | SpBE3 | UUAACAU | | | | | | | | | | | | | 27-191 |
| Q805X | SpBE3 | AUGAGUAUUUCCA | 1633 | (TGG) | 20 (C12) | 4.4 | 67 | 51 | 39 | 7 | 51 | 32 | 4 | + | 0-0-2- |
| | | AGUAGGC | | | | | | | | | | | | | 25-177 |
| Q360X | SpBE3 | GGCUAAUGACCCA | 1634 | (TGG) | 20 (C12) | 6.1 | 83 | 28 | 33 | 5 | 28 | 10 | 6 | - | 0-0-1-7- |
| | | AGAUUAC | | | | | | | | | | | | | 57 |
| Q323X | EQR- | CUCGUGUGUAGUC | 1635 | (AGAG) | 20 (C13) | 4.4 | 75 | 40 | 5 | 1 | 34 | 46 | 4 | + | 0-0-1- |
| | SpBE3 | AGUGUCC | | | | | | | | | | | | | 10-63 |
| W730X | KKH- | AUCCAAUAUGGAG | 1636 | (CCAGAT) | 20 (C4) | 4.1 | 64 | 39 | 51 | 5 | 19 | 44 | 4 | - | 0-0-2- |
| | SaBE3 | AGCAAUU | | | | | | | | | | | | | 11-36 |
| R214X | EQR- | UUCGAACUUUCAG | 1637 | (AGAG) | 20 (C3) | 4.7 | 42 | 49 | 72 | 2 | 33 | 28 | 4 | - | 0-2-2- |
| | SpBE3 | AGUAUUG | | | | | | | | | | | | | 14-188 |
| Q265X | VQR- | ACAGCUGUUCAUG | 1638 | (TGAA) | 20 (C2) | 8.1 | 61 | 53 | 43 | 10 | 50 | 33 | 8 | - | 0-0-4- |
| | SpBE3 | GGAAACC | | | | | | | | | | | | | 15-185 |
| Q687X | EQR- | UCAGACAGAGAGC | 1639 | (AGAG) | 20 (C5) | 4.0 | 55 | 56 | 51 | 34 | 77 | 26 | 4 | - | 0-0-3- |
| | SpBE3 | AAUGAGU | | | | | | | | | | | | | 30-285 |
| W908X | St3BE3 | AGUCGUUCAUGUG | 1640 | (GGGAG) | 20 (C15) | 5.7 | 48 | 63 | 24 | 22 | 54 | 63 | 5 | + | 1-0-1-3- |
| | | CCACCGU | | | | | | | | | | | | | 7 |
| W363X | SpBE3 | AAGGUUUUCCCAG | 1641 | (GGG) | 20 (C11) | 8.2 | 64 | 46 | 28 | 10 | 55 | 46 | 8 | - | 0-0-5- |
| | | UAAUCUU | | | | | | | | | | | | | 17-172 |
| Q1401X | SpBE3 | UAAAGGCAACUUU | 1642 | (TGG) | 20 (C7) | 7.3 | 53 | 49 | 49 | 14 | 83 | 37 | 7 | - | 0-0-3- |
| | | UAAGGGA | | | | | | | | | | | | | 37-245 |
| W908X | SpBE3 | UGUGCCACCGUGG | 1643 | (CAG) | 20 (C6) | 5.5 | 48 | 52 | 41 | 33 | 34 | 77 | 5 | - | 1-0-0-2- |
| | | GAGCGUA | | | | | | | | | | | | | 49 |
| W730X | EQR- | UUGAAUUUUAUCC | 1644 | (AGAG) | 20 (C13) | 3.0 | 41 | 52 | 54 | 6 | 68 | 29 | 3 | - | 0-1-3- |
| | SpBE3 | AAUAUGG | | | | | | | | | | | | | 33-405 |
| W808X | SpBE3 | CAAAAAUAUUCCA | 1645 | (TGG) | 20 (C12) | 3.8 | 61 | 34 | 31 | 1 | 22 | 34 | 3 | - | 0-1-4- |
| | | GCCUACU | | | | | | | | | | | | | 18-174 |
| Q1026X | VQR- | GAUAAGACAAGCA | 1646 | (TGAA) | 20 (C8) | 3.9 | 49 | 41 | 46 | 5 | 76 | 24 | 3 | - | 0-0-1- |
| | SpBE3 | GAAGAUC | | | | | | | | | | | | | 32-348 |
| R214X | EQR- | UCUUCGAACUUUC | 1647 | (TGAG) | 20 (C5) | 5.4 | 56 | 38 | 19 | 11 | 33 | 30 | 5 | - | 0-1-3- |
| | SpBE3 | AGAGUAU | | | | | | | | | | | | | 10-139 |

^{a}BE types: SpBE3 = APOBEC1-SpCas9n-UGI; VQR-SpBE3 = APOBEC1-VQR-SpCas9n-UGI; EQR-SpBE3 = APOBEC1-EQR-SpCas9n-UGI; VRER-SpBE3 = APOBEC1-VRER-SpCas9n-UGI; SaBE3 = APOBEC1-SaCas9n-UGI; KKH-SaBE3 = APOBEC1-KKH-SaCas9n-UGI; St3BE3 = APOBEC1-St3Cas9n-UGI; St1BE3 = APOBEC1-St1Cas9n-UGI.
^{b}Efficiency score, based on Housden et al (Science Signaling, 2015, 8 (393):rs9).
^{c}Specificity scores based on Hsu et al (Nature biotechnology, 2013, 31 (9):827-832), Fusi et al (bioRxiv 021568; doi: http://dx.doi.org/10.1101/021568), Chari et al (Nature Methods, 2015, 12 (9):823-6), Doench et al (Nature Biotechnology, 2014, 32 (12):1262-7), Wang et al (Science, 2014, 343 (6166): 80-4), Moreno-Mateos et al (Nature Methods, 2015, 12 (10)982-8), Housden et al (Science Signaling, 2015, 8 (393):rs9), and the ″Prox/GC″ column shows ″+″ if the proximal 6 bp to the PAM has a GC count > = 4, and GG if the guide ends with GG, based on Farboud et al (Genetics, 2015, 199 (4):959-71).
^{d}Number of predicted off-target binding sites in the human genome allowing up to 0, 1, 2, 3 or 4 mismatches, respectively shown in the format 0-1-2-3-4. Algorithm used: Haeussler et al, Genome Biol. 2016; 17: 148.

TABLE 8
Exemplary Efficiency and Specificity Scores for gRNAs for NaV1.7 (SCN9A) Protective Loss-of-Function Mutations via Codon
Change

| | | Programmable | SEQ | | | | | | | | | | | Pro | |
|---|---|---|---|---|---|---|---|---|---|---|---|---|---|---|---|
| Target | BE | guide-RNA | ID | | gRNA size | | | | | | | M.- | Hous- | x/ | Off |
| variants | type^{a} | sequence | NOs | PAM | (C edited) | Eff^{b} | Hsu^{c} | Fusi | Chari | Doench | Wang | M. | den | GC | targets^{d} |
| C324Y | St1BE3 | GGACACUGACUACA | 1648 | (AAAGAAC) | 20 (C7/8) | 6.2 | 99 | 68 | 99 | 61 | 84 | 36 | 6 | + | 0-0-0- |
| | | CACGAG | | | | | | | | | | | | | 0-9 |
| P613L/S/F | KKH- | CCAAUGCUGCCGGU | 1649 | (GAAAAT) | 20 (C5) | 9.2 | 100 | 63 | 97 | 70 | 88 | 71 | 9 | + | 0-0-0- |
| | SaBE3 | GAACGG | | | | | | | | | | | | | 0-2 |
| P591L/S/F | VRER- | UGUGCCCCACAGAC | 1650 | (AGCG) | 20 (C8) | 7.8 | 97 | 64 | 96 | 18 | 84 | 69 | 7 | + | 0-0-0- |
| | SpBE3 | CCCAGG | | | | | | | | | | | | | 1-13 |
| G785R | St1BE3 | GAUUCCAGUAAAGA | 1651 | (TGAGAAA) | 20 (C9) | 6.3 | 94 | 59 | 99 | 24 | 78 | 42 | 6 | - | 0-0-0- |
| | | CCUAAG | | | | | | | | | | | | | 1-52 |
| P683L/S/F | KKH- | GAUCCCAACCUCAG | 1652 | (AGCAAT) | 20 (C14) | 6.2 | 92 | 66 | 99 | 39 | 77 | 26 | 6 | - | 0-0-0- |
| | SaBE3 | ACAGAG | | | | | | | | | | | | | 2-13 |
| C925Y | KKH- | UCUCCACACAGCAC | 1653 | (CACAAT) | 20 (C2) | 4.7 | 98 | 62 | 87 | 26 | 59 | 45 | 4 | + | 0-0-0- |
| | SaBE3 | GCGGAA | | | | | | | | | | | | | 0-11 |
| P1712/3L/ | KKH- | CCACCCGACUGUGA | 1654 | (AAAAGT) | 20 (C3/4/12) | 6.1 | 99 | 57 | 86 | 18 | 39 | 61 | 6 | - | 0-0-0- |
| S/F | SaBE3 | cCCAAA | | | | | | | | | | | | | 0-5 |
| P1606L/S/F | KKH- | GUGUCCCCUACCCU | 1655 | (AGTGAT) | 20 (C13114) | 6.4 | 93 | 56 | 92 | 50 | 76 | 41 | 6 | + | 0-0-0- |
| | SaBE3 | GUUCCG | | | | | | | | | | | | | 1-13 |
| P983L/S/F | KKH- | GACCCUGAUGCAAA | 1656 | (CCAGAT) | 20 (C819) | 3.5 | 96 | 58 | 82 | 9 | 74 | 24 | 3 | - | 0-0-0- |
| | SaBE3 | CAACCU | | | | | | | | | | | | | 2-17 |
| P591L/S/F | St3BE3 | GUUUGUGCCCCACA | 1657 | (AGGAG) | 20 (C7-14) | 7.0 | 90 | 55 | 86 | 45 | 74 | 38 | 7 | + | 0-0-0- |
| | | GACCCC | | | | | | | | | | | | | 3-38 |
| P532L/S/F | KKH- | UACCCCCAAUCAGG | 1658 | (CCAAAT) | 20 (C6-13) | 4.7 | 96 | 56 | 77 | 5 | 47 | 48 | 4 | - | 0-0-0- |
| | SaBE3 | UACCAC | | | | | | | | | | | | | 0-3 |
| P1606L/S/F | VQR- | GUGUCCCCUACCCU | 1659 | (AGTG) | 20 (C5-12) | 6.4 | 81 | 56 | 92 | 50 | 76 | 41 | 6 | + | 0-0-1- |
| | SpBE3 | GUUCCG | | | | | | | | | | | | | 7-62 |
| P1496/8L/ | SpBE3 | AAAAGCCAAUUCCU | 1660 | (GGG) | 20 (C5-12) | 6.0 | 87 | 61 | 85 | 14 | 64 | 56 | 6 | + | 0-0-2- |
| S/F | | CGACCA | | | | | | | | | | | | | 12-86 |
| P1133/5L/ | St1BE3 | AUAACCCUUUGCCU | 1661 | (GGAGAAG) | 20 (C7-14) | 6.5 | 90 | 53 | 81 | 33 | 46 | 53 | 6 | - | 0-0-0- |
| S/F | | GGAGAA | | | | | | | | | | | | | 4-44 |
| P111L/S/F | SaBE3 | UCUCCUUUCAGUCC | 1662 | (AAGAAT) | 20 (C7-14) | 4.4 | 88 | 47 | 81 | 69 | 37 | 24 | 4 | - | 0-0-1- |
| | | UCUAAG | | | | | | | | | | | | | 4-27 |
| P229L/S/F | KKH- | GUAAUCCCAGGUAA | 1663 | (ATTGGT) | 20 (C5-12) | 4.3 | 88 | 45 | 81 | 26 | 64 | 45 | 4 | - | 0-0-1- |
| | SaBE3 | GAAGUA | | | | | | | | | | | | | 5-17 |
| P1791L/S/F | KKH- | GAAGUUUGAUCCCG | 1664 | (CCCAGT) | 20 (C11/12) | 2.6 | 98 | 59 | 67 | 37 | 92 | 59 | 2 | - | 0-0-0- |
| | SaBE3 | AUGCGA | | | | | | | | | | | | | 1-1 |
| C315Y | SaBE3 | AACCACAAAGGAGA | 1665 | (TTGGAT) | 20 (C8) | 4.6 | 89 | 47 | 76 | 1 | 40 | 14 | 4 | - | 0-0-0- |
| | | GCAUCU | | | | | | | | | | | | | 2-21 |
| C1154Y | SaBE3 | GAAACAGGCCUCUG | 1666 | (CGGAAT) | 20 (C15) | 6.6 | 90 | 55 | 74 | 17 | 46 | 66 | 6 | - | 0-0-0- |
| | | GCUCAU | | | | | | | | | | | | | 4-4 |
| P1133/5L/ | St1BE3 | ACCCUUUGCCUGGA | 1667 | (GAAGAAG) | 20 (C16) | 5.8 | 93 | 60 | 70 | 39 | 51 | 40 | 5 | - | 0-0-1- |
| S/F | | GAAGGA | | | | | | | | | | | | | 2-17 |
| G786R | EQR- | GAUUCCAGUAAAGA | 1668 | (TGAG) | 20 (C4) | 6.3 | 63 | 59 | 99 | 24 | 78 | 42 | 6 | - | 0-0-1- |
| | SpBE3 | CCUAAG | | | | | | | | | | | | | 28-179 |
| P1145L/S/F | SpBE3 | CUGAACCUAUGAAU | 1669 | (GAG) | 20 (C10) | 6.4 | 94 | 68 | 59 | 82 | 45 | 24 | 6 | - | 0-0-0- |
| | | UCCGAU | | | | | | | | | | | | | 1-117 |
| P609/10L/ | VQR- | GUCCCCACCAAUGC | 1670 | (TGAA) | 20 (C17) | 5.5 | 87 | 57 | 75 | 12 | 87 | 60 | 5 | + | 0-0-0- |
| S/F | SpBE3 | UGCCGG | | | | | | | | | | | | | 10-66 |
| P609/10L/ | VQR- | AGGUCCCCACCAAU | 1671 | (GGTG) | 20 (C11) | 8.7 | 84 | 49 | 78 | 14 | 43 | 13 | 8 | + | 0-0-0- |
| S/F | SpBE3 | GCUGCC | | | | | | | | | | | | | 9-85 |
| P1093L/S/F | KKH- | CACCUGGGGAAUCC | 1672 | (GAAAAT) | 20 (C12) | 6.5 | 98 | 59 | 62 | 2 | 36 | 60 | 6 | - | 0-0-0- |
| | SaBE3 | GAUUUG | | | | | | | | | | | | | 0-8 |
| C944Y | VRER- | AUAAGGCACAUAGC | 1673 | (AGCG) | 20 (C13) | 4.8 | 100 | 60 | 48 | 12 | 66 | 21 | 4 | - | 0-0-0- |
| | SpBE3 | UUGACC | | | | | | | | | | | | | 1-6 |
| P337L/S/F | EQR- | AAACCCUGAUUAUG | 1674 | (CGAG) | 20 (C13) | 3.9 | 77 | 63 | 82 | 7 | 29 | 28 | 3 | - | 0-0-0- |
| | SpBE3 | GCUACA | | | | | | | | | | | | | 13-121 |
| P594L/S/F | SpBE3 | CACAGACCCCAGGA | 1675 | (CAG) | 20 (C5) | 7.7 | 82 | 59 | 77 | 65 | 72 | 64 | 7 | + | 0-0-2- |
| | | GCGACG | | | | | | | | | | | | | 17-142 |
| P80L/S/F | KKH- | GACCCCUACUAUGC | 1676 | (AAAGGT) | 20 (C6) | 4.5 | 95 | 62 | 55 | 12 | 70 | 48 | 4 | - | 0-0-0- |
| | SaBE3 | AGACAA | | | | | | | | | | | | | 2-7 |
| P80L/S/F | St3BE3 | CCCCUACUAUGCAG | 1677 | (AGGTG) | 20 (C7) | 3.5 | 92 | 37 | 65 | 27 | 24 | 42 | 3 | - | 0-0-0- |
| | | ACAAAA | | | | | | | | | | | | | 4-31 |
| P60L/S/F | St3BE3 | AAACAGCUGCCCUU | 1678 | (TGGGG) | 20 (C11) | 8.4 | 96 | 26 | 61 | 3 | 53 | 35 | 8 | - | 0-0-0- |
| | | CAUCUA | | | | | | | | | | | | | 3-29 |
| P1490S^{d} | KKH- | GGGUCCAAGAAGCC | 1679 | (GCCAAT) | 20 (C13) | 5.0 | 75 | 57 | 81 | 64 | 74 | 57 | 5 | - | 0-0-0- |
| | SaBE3 | ACAAAA | | | | | | | | | | | | | 2-28 |
| P594L/S/F | KKH- | ACAGACCCCAGGAG | 1680 | (AGCAGT) | 20 (C14) | 4.3 | 97 | 52 | 58 | 14 | 77 | 55 | 4 | + | 0-0-0- |
| | SaBE3 | CGACGC | | | | | | | | | | | | | 2-12 |
| C324Y | VQR- | CUGGACACUGACUA | 1681 | (AGAA) | 20 (C7) | 5.5 | 85 | 69 | 69 | 75 | 67 | 61 | 5 | + | 0-0-1- |
| | SpBE3 | CACACG | | | | | | | | | | | | | 7-86 |
| G830R | St1BE3 | UGACAAUCCUUCCA | 1682 | (CTAGAAA) | 20 (C16) | 4.1 | 96 | 58 | 58 | 15 | 54 | 36 | 4 | - | 0-0-0- |
| | | CAUCUG | | | | | | | | | | | | | 2-13 |
| C1526Y | KKH- | AGACAGAUAAGAAC | 1683 | (ACTAAT) | 20 (C5) | 4.5 | 87 | 54 | 67 | 41 | 53 | 20 | 4 | - | 0-0-0- |
| | SaBE3 | CAUGAU | | | | | | | | | | | | | 3-26 |
| P850L/S/F | KKH- | UCCUGGCCAACAUU | 1684 | (GCTGAT) | 20 (C6) | 5.4 | 94 | 58 | 52 | 31 | 55 | 43 | 5 | - | 0-0-0- |
| | SaBE3 | GAACAU | | | | | | | | | | | | | 2-15 |
| P67L/S/F | St3BE3 | UGGGGACAUUCCUC | 1685 | (TGGTG) | 20 (C9) | 4.4 | 96 | 56 | 34 | 5 | 61 | 77 | 4 | + | 0-0-0- |
| | | CCGGCA | | | | | | | | | | | | | 0-29 |
| P148L/S/F | KKH- | AUAACCCACCGGAC | 1686 | (AAAAAT) | 20 (C12) | 6.5 | 99 | 52 | 46 | 17 | 52 | 28 | 6 | + | 0-0-0- |
| | SaBE3 | UGGACC | | | | | | | | | | | | | 0-4 |
| P1133/5L/ | St1BE3 | CAGUUGAUAACCCU | 1687 | (GGAGAAG) | 20 (C14) | 5.3 | 97 | 54 | 16 | 22 | 75 | 31 | 5 | - | 0-0-0- |
| S/F | | UUGCCU | | | | | | | | | | | | | 0-25 |
| P325L/S/F | VQR- | AGUGUCCAGAGGGG | 1688 | (TGTG) | 20 (C8) | 6.9 | 90 | 54 | 60 | 3 | 54 | 47 | 6 | - | 0-0-0- |
| | SpBE3 | UACACC | | | | | | | | | | | | | 5-64 |
| P148L/S/F | SpBE3 | CCAUGAAUAACCCA | 1689 | (TGG) | 20 (C11) | 4.4 | 98 | 52 | 46 | 18 | 56 | 43 | 4 | + | 0-0-0- |
| | | CCGGAC | | | | | | | | | | | | | 3-24 |
| P1090L/S/F | St3BE3 | GUGACAGUGCCAAU | 1690 | (TGGGG) | 20 (C14) | 9.0 | 98 | 50 | 51 | 16 | 59 | 10 | 9 | + | 0-0-0- |
| | | UGCACC | | | | | | | | | | | | | 1-20 |
| P1498/1500 | KKH- | AAUUCCUCGACCAG | 1691 | (AAAAAT) | 20 (C9110) | 5.6 | 99 | 50 | 33 | 10 | 43 | 54 | 5 | - | 0-0-0- |
| L/S/F | SaBE3 | GGGUAA | | | | | | | | | | | | | 0-2 |
| S1490F^{d} | SpBE3 | UGGGGUCCAAGAAG | 1692 | (AAG) | 20 (C819) | 4.2 | 63 | 64 | 85 | 16 | 74 | 64 | 4 | - | 0-0-3- |
| | | CCACAA | | | | | | | | | | | | | 18-214 |
| P1090L/S/F | SpBE3 | UGACAGUGCCAAUU | 1693 | (GGG) | 20 (C7/8) | 7.4 | 80 | 63 | 68 | 42 | 71 | 30 | 7 | + | 0-0-1- |
| | | GCACCU | | | | | | | | | | | | | 12-120 |
| P1018L/S/F | St3BE3 | CAAAAAGCCAAAGA | 1694 | (GGGAG) | 20 (C5/6) | 4.5 | 87 | 55 | 61 | 40 | 77 | 30 | 4 | - | 0-0-0- |
| | | UUUCCA | | | | | | | | | | | | | 7-74 |
| G1626R | SpBE3 | UUGCUCCUUUGACU | 1695 | (AGG) | 20 (C10/11) | 5.6 | 86 | 62 | 42 | 43 | 59 | 56 | 5 | - | 0-0-4- |
| | | AGACGU | | | | | | | | | | | | | 5-68 |
| P711/2L/ | KKH- | AAAAUGUCCACCUU | 1696 | (ACAGAT) | 20 (C7/8) | 5.6 | 91 | 57 | 29 | 6 | 47 | 29 | 5 | + | 0-0-1- |
| S/F | SaBE3 | GGUGGU | | | | | | | | | | | | | 2-28 |
| C140Y | KKH- | AUAAAUAUGCAGUU | 1697 | (AATAGT) | 20 (C-1) | 9.0 | 77 | 60 | 70 | 35 | 60 | 54 | 9 | - | 0-0-0- |
| | SaBE3 | UGUCAG | | | | | | | | | | | | | 5-34 |
| P1083L/S/F | KKH- | CACAAUCCCAGCCU | 1698 | (GACAGT) | 20 (C5) | 6.0 | 85 | 62 | 50 | 18 | 62 | 45 | 6 | - | 0-0-0- |
| | SaBE3 | CACAGU | | | | | | | | | | | | | 2-28 |
| G1626R | SaBE3 | UUUGCUCCUUUGAC | 1699 | (TAGGAT) | 20 (C6) | 4.4 | 91 | 56 | 43 | 49 | 70 | 29 | 4 | - | 0-0-3- |
| | | UAGACG | | | | | | | | | | | | | 3-6 |
| P609/10L/ | KKH- | AGUAGGUCCCCACC | 1700 | (GCCGGT) | 20 (C7) | 6.1 | 97 | 50 | 39 | 21 | 61 | 48 | 6 | - | 0-0-0- |
| S/F | SaBE3 | AAUGCU | | | | | | | | | | | | | 1-7 |
| P1496/8L/ | SaBE3 | CAAAAGCCAAUUCC | 1701 | (AGGGGT) | 20 (C12) | 3.5 | 95 | 52 | 25 | 6 | 71 | 37 | 3 | + | 0-0-0- |
| S/F | | UCGACC | | | | | | | | | | | | | 1-7 |
| P60L/S/F | SpBE3 | ACAGCUGCCCUUCA | 1702 | (GGG) | 20 (C13) | 6.7 | 69 | 71 | 77 | 39 | 52 | 44 | 6 | - | 0-0-4- |
| | | UCUAUG | | | | | | | | | | | | | 19-191 |
| P1133/5L/ | St3BE3 | ACAGUUGAUAACCC | 1703 | (TGGAG) | 20 (C7) | 4.7 | 94 | 52 | 29 | 12 | 62 | 11 | 4 | - | 0-0-1- |
| S/F | | UUUGCC | | | | | | | | | | | | | 3-20 |
| P609/10L/ | St3BE3 | UAGGUCCCCACCAA | 1704 | (CGGTG) | 20 (C3) | 4.6 | 94 | 52 | 15 | 12 | 61 | 46 | 4 | + | 0-0-0- |
| S/F | | UGCUGC | | | | | | | | | | | | | 5-24 |
| P1145L/S/F | EQR- | GCUGAACCUAUGAA | 1705 | (TGAG) | 20 (C4) | 3.4 | 87 | 58 | 55 | 32 | 90 | 29 | 3 | - | 0-0-1- |
| | SpBE3 | UUCCGA | | | | | | | | | | | | | 2-79 |
| P1151L/S/F | KKH- | AGCCAGAGGCCUGU | 1706 | (GATGGT) | 20 (C8) | 9.0 | 90 | 55 | 46 | 8 | 43 | 31 | 9 | - | 0-0-0- |
| | SaBE3 | UUCACA | | | | | | | | | | | | | 1-20 |
| P1090L/S/F | SpBE3 | GACAGUGCCAAUUG | 1707 | (GGG) | 20 (C4/5) | 5.3 | 70 | 57 | 74 | 5 | 74 | 62 | 5 | + | 0-0-1- |
| | | CACCUG | | | | | | | | | | | | | 20-184 |
| P1133/5L/ | St3BE3 | GAUAACCCUUUGCC | 1708 | (AGGAG) | 20 (C5) | 3.7 | 93 | 51 | 42 | 12 | 82 | 33 | 3 | - | 0-0-0- |
| S/F | | UGGAGA | | | | | | | | | | | | | 3-35 |
| P1955/6L/ | KKH- | CCACCUCUCCACCU | 1709 | (GATAGT) | 20 (C8) | 8.1 | 92 | 52 | 42 | 63 | 37 | 38 | 8 | - | 0-0-0- |
| S/F | SaBE3 | UCAUAU | | | | | | | | | | | | | 1-12 |
| P1496L/S/F | St3BE3 | CAAAAGCCAAUUCC | 1710 | (AGGGG) | 20 (C9) | 3.5 | 92 | 52 | 25 | 6 | 71 | 37 | 3 | + | 0-0-2- |
| | | UCGACC | | | | | | | | | | | | | 1-22 |
| P1360L/S/F | KKH- | GGUUUCCUGCAAGU | 1711 | (CCAAAT) | 20 (C13) | 10.8 | 90 | 47 | 53 | 24 | 57 | 48 | 10 | - | 0-0-0- |
| | SaBE3 | CAAGUU | | | | | | | | | | | | | 3-9 |
| C1154Y | SpBE3 | GAAACAGGCCUCUG | 1712 | (CGG) | 20 (C10) | 6.6 | 68 | 55 | 74 | 17 | 46 | 66 | 6 | - | 0-0-1- |
| | | GCUCAU | | | | | | | | | | | | | 22-132 |
| P1722L/S/F | St3BE3 | CAUCCUGGAAGUUC | 1713 | (AGGAG) | 20 (C14) | 4.4 | 89 | 53 | 42 | 5 | 39 | 35 | 4 | - | 0-0-1- |
| | | AGUUGA | | | | | | | | | | | | | 5-40 |
| C1370Y | SpBE3 | GCAAAACAUUCGGA | 1714 | (TGG) | 20 (C2) | 3.9 | 95 | 37 | 47 | 14 | 64 | 26 | 3 | - | 0-0-1- |
| | | ACGAUU | | | | | | | | | | | | | 2-35 |
| P1773L/S/F | KKH- | CCUCUGAGUGAGGA | 1715 | (TGAGAT) | 20 (C3) | 5.0 | 92 | 50 | 25 | 16 | 40 | 42 | 5 | - | 0-0-1- |
| | SaBE3 | UGACUU | | | | | | | | | | | | | 3-12 |
| P60L/S/F | VQR- | CAGCUGCCCUUCAU | 1716 | (GGAC) | 20 (C4) | 6.0 | 76 | 65 | 47 | 21 | 68 | 67 | 6 | - | 0-0-0- |
| | SpBE3 | CUAUGG | | | | | | | | | | | | | 13-167 |
| G1736R | KKH- | UAUUCCAACAGAUG | 1717 | (CACAGT) | 20 (C10/11) | 5.5 | 95 | 42 | 46 | 1 | 19 | 39 | 5 | - | 0-0-0- |
| | SaBE3 | GGUUAC | | | | | | | | | | | | | 1-10 |
| P1093L/S/F | VQR- | GCACCUGGGGAAUC | 1718 | (GGAA) | 20 (C6/7) | 5.4 | 93 | 36 | 48 | 6 | 36 | 59 | 5 | - | 0-0-1- |
| | SpBE3 | CGAUUU | | | | | | | | | | | | | 2-54 |
| P1133/5L/ | EQR- | AUAACCCUUUGCCU | 1719 | (GGAG) | 20 (C12/13) | 6.5 | 59 | 53 | 81 | 33 | 46 | 53 | 6 | - | 0-0-2- |
| S/F | SpBE3 | GGAGAA | | | | | | | | | | | | | 22-182 |
| P187L/S/F | SaBE3 | UUCGUGACCCGUGG | 1720 | (CTGGAT) | 20 (C12-14) | 7.2 | 87 | 53 | 51 | 10 | 73 | 58 | 7 | - | 0-0-2- |
| | | AACUGG | | | | | | | | | | | | | 2-5 |
| C1690Y | KKH- | AGGCAAAUCAUACU | 1721 | (AAAGGT) | 20 (C10/11) | 6.3 | 91 | 49 | 43 | 19 | 36 | 33 | 6 | + | 0-0-1- |
| | SaBE3 | GUUGCC | | | | | | | | | | | | | 1-19 |
| P229L/S/F | St3BE3 | AAUCCCAGGUAAGA | 1722 | (TGGTG) | 20 (C1-5) | 7.1 | 83 | 38 | 57 | 9 | 38 | 54 | 7 | - | 0-0-1- |
| | | AGUAAU | | | | | | | | | | | | | 4-47 |
| C330Y | VQR- | UCACACAGGUGUAC | 1723 | (GGAC) | 20 (C213) | 5.8 | 85 | 55 | 38 | 2 | 27 | 51 | 5 | + | 0-0-0- |
| | SpBE3 | cccucu | | | | | | | | | | | | | 9-101 |
| G1577R | KKH- | AUUCCAUCCUACAG | 1724 | (AGTAGT) | 20 (C-1) | 4.4 | 89 | 51 | 15 | 15 | 37 | 35 | 4 | - | 0-0-0- |
| | SaBE3 | UGAAGU | | | | | | | | | | | | | 1-20 |
| C324Y | St1BE3 | CUCUGGACACUGAC | 1725 | (CGAGAAA) | 20 (C1) | 5.8 | 87 | 52 | 23 | 34 | 45 | 21 | 5 | - | 0-0-1- |
| | | UACACA | | | | | | | | | | | | | 3-46 |
| G1626R | VQR- | UGCUCCUUUGACUA | 1726 | (GGAT) | 20 (C13) | 4.8 | 89 | 49 | 48 | 50 | 26 | 51 | 4 | - | 0-0-3- |
| | SpBE3 | GACGUA | | | | | | | | | | | | | 5-66 |
| C275Y | KKH- | AUUUCGAAAACAUU | 1727 | (TCAGGT) | 20 (C15) | 5.8 | 83 | 45 | 55 | 7 | 52 | 14 | 5 | - | 0-0-0- |
| | SaBE3 | UAUGCU | | | | | | | | | | | | | 3-48 |
| P1093L/S/F | SpBE3 | UGCACCUGGGGAAU | 1728 | (TGG) | 20 (C16) | 7.0 | 94 | 34 | 44 | 0 | 29 | 37 | 7 | - | 0-0-0- |
| | | CCGAUU | | | | | | | | | | | | | 4-48 |
| P683L/S/F | EQR- | AUGAUCCCAACCUC | 1729 | (AGAG) | 20 (C1) | 3.8 | 66 | 61 | 71 | 36 | 80 | 57 | 3 | - | 0-0-1- |
| | SpBE3 | AGACAG | | | | | | | | | | | | | 18-162 |
| P1018L/S/F | KKH- | AAAAAGCCAAAGAU | 1730 | (GGAGAT) | 20 (C18) | 5.8 | 49 | 57 | 88 | 27 | 91 | 43 | 5 | - | 0-0-1- |
| | SaBE3 | UUCCAG | | | | | | | | | | | | | 12-27 |
| P1090L/S/F | SpBE3 | GUGACAGUGCCAAU | 1731 | (TGG) | 20 (C2) | 9.0 | 86 | 50 | 51 | 16 | 59 | 10 | 9 | + | 0-0-2- |
| | | UGCACC | | | | | | | | | | | | | 8-82 |
| P609/10L/ | SpBE3 | CCACCAAUGCUGCC | 1732 | (CGG) | 20 (C16) | 7.3 | 87 | 50 | 49 | 19 | 22 | 47 | 7 | - | 0-0-1- |
| S/F | | GGUGAA | | | | | | | | | | | | | 7-85 |
| P1319L/S/F | VQR- | GCAAUUCCUUCCAU | 1733 | (TGTG) | 20 (C415) | 5.9 | 63 | 55 | 73 | 16 | 64 | 28 | 5 | - | 0-0-2- |
| | SpBE3 | CAUGAA | | | | | | | | | | | | | 18-223 |
| P536L/S/F | SpBE3 | CAGUCACCACUCAG | 1734 | (TGG) | 20 (C3/4) | 7.0 | 81 | 43 | 55 | 9 | 45 | 39 | 7 | - | 0-0-1- |
| | | CAUUCG | | | | | | | | | | | | | 12-123 |
| P1297L/S/F | KKH- | AAGACCUCUAAGAG | 1735 | (CTAGAT) | 20 (C112) | 5.1 | 98 | 38 | 8 | 6 | 40 | 54 | 5 | - | 0-0-0- |
| | SaBE3 | CCUUAU | | | | | | | | | | | | | 1-5 |
| P60L/S/F | SpBE3 | AAACAGCUGCCCUU | 1736 | (TGG) | 20 (C314) | 8.4 | 74 | 26 | 61 | 3 | 53 | 35 | 8 | - | 0-0-2- |
| | | CAUCUA | | | | | | | | | | | | | 12-147 |
| P35L/S/F | St1BE3 | UCAAAGGAACCCAA | 1737 | (AAAGAAA) | 20 (C11/12) | 5.0 | 43 | 46 | 91 | 11 | 72 | 29 | 5 | - | 0-1-0- |
| | | AGAAGA | | | | | | | | | | | | | 21-224 |
| P67/8L/S/F | SpBE3 | UGGGGACAUUCCUC | 1738 | (TGG) | 20 (C7/8) | 4.4 | 78 | 56 | 34 | 5 | 61 | 77 | 4 | + | 0-0-0- |
| | | CCGGCA | | | | | | | | | | | | | 8-149 |
| P646L/S/F | KKH- | AGCUUCUGCCAGAG | 1739 | (ATAGAT) | 20 (C5/6) | 6.7 | 94 | 40 | 24 | 1 | 30 | 23 | 6 | - | 0-0-0- |
| | SaBE3 | GUGAUA | | | | | | | | | | | | | 3-16 |
| P1829L/S/F | St3BE3 | AUGGAUCUGCCCAU | 1740 | (TGGTG) | 20 (C4/5) | 10.0 | 68 | 49 | 65 | 10 | 39 | 59 | 10 | - | 0-2-3- |
| | | GGUUAG | | | | | | | | | | | | | 2-39 |
| C330Y | SpBE3 | UUCACACAGGUGUA | 1741 | (TGG) | 20 (C3/4) | 5.0 | 87 | 42 | 46 | 4 | 29 | 50 | 5 | + | 0-0-0- |
| | | CCCCUC | | | | | | | | | | | | | 8-88 |
| G1577R | SpBE3 | UCCAUCCUACAGUG | 1742 | (TAG) | 20 (C2/3) | 6.5 | 72 | 61 | 40 | 24 | 62 | 53 | 6 | - | 0-0-4- |
| | | AAGUAG | | | | | | | | | | | | | 11-122 |
| P1496/8L/ | SpBE3 | CAAAAGCCAAUUCC | 1743 | (AGG) | 20 (C1/2) | 3.5 | 81 | 52 | 25 | 6 | 71 | 37 | 3 | + | 0-0-3- |
| S/F | | UCGACC | | | | | | | | | | | | | 12-94 |
| C1328Y | KKH- | AGACACACAAGUAG | 1744 | (CATGAT) | 20 (C13/14) | 5.1 | 90 | 43 | 22 | 5 | 29 | 29 | 5 | - | 0-0-0- |
| | SaBE3 | CACAUU | | | | | | | | | | | | | 1-20 |
| P1496L/S/F | SpBE3 | ACAAAAGCCAAUUC | 1745 | (CAG) | 20 (C415) | 5.1 | 85 | 48 | 8 | 14 | 50 | 38 | 5 | + | 0-0-0- |
| | | CUCGAC | | | | | | | | | | | | | 10-75 |
| G1339R | St1BE3 | CCCAUGAUGCUGAA | 1746 | (CCAGAAT) | 20 (C7) | 6.9 | 62 | 64 | 70 | 41 | 63 | 39 | 6 | - | 0-2-3- |
| | | UAUCAG | | | | | | | | | | | | | 3-15 |
| P1717L/S/F | SpBE3 | GACCCAAAAAAAGU | 1747 | (TGG) | 20 (C13114) | 5.9 | 63 | 56 | 69 | 6 | 73 | 0 | 5 | - | 0-0-3- |
| | | UCAUCC | | | | | | | | | | | | | 18-120 |
| P591L/S/F | EQR- | UUUGUGCCCCACAG | 1748 | (GGAG) | 20 (C12/13) | 6.8 | 56 | 55 | 76 | 70 | 75 | 54 | 6 | + | 0-0-1- |
| | SpBE3 | ACCCCA | | | | | | | | | | | | | 32-223 |
| G1626R | SpBE3 | UUUGCUCCUUUGAC | 1749 | (TAG) | 20 (C13/14) | 4.4 | 76 | 56 | 43 | 44 | 70 | 29 | 4 | - | 0-0-2- |
| | | UAGACG | | | | | | | | | | | | | 24-72 |
| P114L/S/F | KKH- | CCUCUAAGAAGAAU | 1750 | (TAAGAT) | 20 (C3) | 6.1 | 93 | 38 | 30 | 16 | 37 | 0 | 6 | - | 0-0-0- |
| | SaBE3 | AUCUAU | | | | | | | | | | | | | 2-21 |
| P800L/S/F | KKH- | AUGGAUCCAUAUGA | 1751 | (CCAAGT) | 20 (C12) | 5.8 | 90 | 41 | 3 | 3 | 22 | 62 | 5 | - | 0-0-0- |
| | SaBE3 | GUAUUU | | | | | | | | | | | | | 2-18 |
| P1285L/S/F | SpBE3 | UUGGCCCCAUUAAA | 1752 | (CGG) | 20 (C13) | 4.5 | 77 | 52 | 46 | 51 | 45 | 39 | 4 | - | 0-0-1- |
| | | UCCCUU | | | | | | | | | | | | | 10-123 |
| G1626R | SpBE3 | CUUUGACUAGACGU | 1753 | (CGG) | 20 (C5) | 7.9 | 81 | 48 | 9 | 41 | 28 | 52 | 7 | - | 0-0-3- |
| | | AGGAUU | | | | | | | | | | | | | 2-53 |
| P111L/S/F | St1BE3 | UUCUCCUUUCAGUC | 1754 | (GAAGAAT) | 20 (C14) | 6.5 | 88 | 41 | 6 | 6 | 17 | 26 | 6 | - | 0-0-0- |
| | | CUCUAA | | | | | | | | | | | | | 8-47 |
| C944Y | SpBE3 | AAUAAGGCACAUAG | 1755 | (CAG) | 20 (C13/14) | 7.7 | 75 | 53 | 19 | 12 | 34 | 35 | 7 | - | 0-0-3- |
| | | CUUGAC | | | | | | | | | | | | | 7-76 |
| C753Y | KKH- | AACUAUGCAAAUGG | 1756 | (CAAGAT) | 20 (C12/13) | 5.0 | 79 | 48 | 36 | 2 | 54 | 34 | 5 | - | 0-0-2- |
| | SaBE3 | UAAUUG | | | | | | | | | | | | | 3-48 |
| P610L/S/F | SpBE3 | CACCAAUGCUGCCG | 1757 | (GGG) | 20 (C11/12) | 4.0 | 90 | 37 | 17 | 4 | 19 | 40 | 4 | - | 0-0-0- |
| | | GUGAAC | | | | | | | | | | | | | 6-66 |
| P1829L/S/F | SpBE3 | AUGGAUCUGCCCAU | 1758 | (TGG) | 20 (C10/11) | 10.0 | 60 | 49 | 65 | 10 | 39 | 59 | 10 | - | 0-2-4- |
| | | GGUUAG | | | | | | | | | | | | | 14-116 |
| P1090/3L/ | KKH- | UGCCAAUUGCACCU | 1759 | (TCCGAT) | 20 (C7/8) | 8.9 | 82 | 43 | 21 | 4 | 44 | 31 | 8 | + | 0-0-1- |
| S/F | SaBE3 | GGGGAA | | | | | | | | | | | | | 4-13 |
| P711/2L/ | VQR- | AAUGUCCACCUUGG | 1760 | (AGAT) | 20 (C112) | 8.2 | 82 | 43 | 7 | 5 | 36 | 56 | 8 | - | 0-0-0- |
| S/F | SpBE3 | UGGUAC | | | | | | | | | | | | | 12-94 |
| P5/6/7L/S/F | EQR- | GUUGCCUCCCCCAG | 1761 | (AGAG) | 20 (C1/2) | 7.0 | 57 | 34 | 67 | 2 | 53 | 31 | 7 | + | 0-0-1- |
| | SpBE3 | GACCUC | | | | | | | | | | | | | 23-184 |
| P1829L/S/F | KKH- | CCAUGGAUCUGCCC | 1762 | (AGTGGT) | 20 (C9/10) | 4.3 | 94 | 30 | 17 | 8 | 44 | 50 | 4 | - | 0-0-1- |
| | SaBE3 | AUGGUU | | | | | | | | | | | | | 3-8 |
| C325Y | EQR- | CUCUGGACACUGAC | 1763 | (CGAG) | 20 (C2/3) | 5.8 | 71 | 52 | 23 | 34 | 45 | 21 | 5 | - | 0-0-2- |
| | SpBE3 | UACACA | | | | | | | | | | | | | 14141 |
| P60L/S/F | SpBE3 | AACAGCUGCCCUUC | 1764 | (GGG) | 20 (C1/2) | 6.2 | 74 | 49 | 3 | 7 | 24 | 25 | 6 | - | 0-0-1- |
| | | AUCUAU | | | | | | | | | | | | | 10-115 |
| P111L/S/F | St1BE3 | GCUUUCUCCUUUCA | 1765 | (TAAGAAG) | 20 (C2/3) | 4.9 | 93 | 28 | 14 | 11 | 38 | 34 | 4 | + | 00 |
| | | GUCCUC | | | | | | | | | | | | | 5-29 |
| P187L/S/F | VQR- | CGUGACCCGUGGAA | 1766 | (GGAT) | 20 (C8-12) | 6.0 | 77 | 43 | 11 | 11 | 48 | 57 | 6 | + | 0-0-3- |
| | SpBE3 | CUGGCU | | | | | | | | | | | | | 9-35 |
| P744L/S/F | KKH- | AUGGAUCCUUUUGU | 1767 | (TGCAAT) | 20 (C14/15) | 6.6 | 91 | 28 | 0 | 0 | 38 | 59 | 6 | - | 0-0-0- |
| | SaBE3 | AGAUCU | | | | | | | | | | | | | 2-22 |
| P1722L/S/F | EQR- | AUCCUGGAAGUUCA | 1768 | (GGAG) | 20 (C9/10) | 4.7 | 63 | 55 | 53 | 16 | 23 | 44 | 4 | - | 0-0-3- |
| | SpBE3 | GUUGAA | | | | | | | | | | | | | 13-230 |
| G236R | SpBE3 | AAGCCCCUACAAUU | 1769 | (AGG) | 20 (C16/17) | 9.1 | 75 | 43 | 42 | 20 | 26 | 35 | 9 | - | 0-0-2- |
| | | GUCUUC | | | | | | | | | | | | | 9-84 |
| P1829L/S/F | VQR- | UGGAUCUGCCCAUG | 1770 | (GGTG) | 20 (C13/14) | 6.3 | 77 | 41 | 34 | 9 | 23 | 37 | 6 | - | 0-0-2- |
| | SpBE3 | GUUAGU | | | | | | | | | | | | | 11-102 |
| G1662R | VRER- | AAGUUGGACAUUCC | 1771 | (GGCG) | 20 (C12/13) | 4.2 | 64 | 54 | 19 | 8 | 66 | 59 | 4 | - | 0-1-1- |
| | SpBE3 | AAAGAU | | | | | | | | | | | | | 1-3 |
| P1133/5L/ | SpBE3 | GAUAACCCUUUGCC | 1772 | (AGG) | 20 (C10/11) | 3.7 | 66 | 51 | 42 | 12 | 82 | 33 | 3 | - | 0-0-1- |
| S/F | | UGGAGA | | | | | | | | | | | | | 15-115 |
| P1151L/S/F | KKH- | AUGAGCCAGAGGCC | 1773 | (ACAGAT) | 20 (C9110) | 6.0 | 93 | 24 | 18 | 1 | 16 | 51 | 6 | - | 0-0-0- |
| | SaBE3 | UGUUUC | | | | | | | | | | | | | 1-18 |
| P1722L/S/F | SpBE3 | CAUCCUGGAAGUUC | 1774 | (AGG) | 20 (C7/8) | 4.4 | 63 | 53 | 42 | 5 | 39 | 35 | 4 | - | 0-0-2- |
| | | AGUUGA | | | | | | | | | | | | | 21-161 |
| C134Y | VQR- | AGUGCACAUGAUGA | 1775 | (TGAA) | 20 (C2/3) | 6.3 | 55 | 60 | 55 | 16 | 61 | 29 | 6 | + | 0-1-2- |
| | SpBE3 | GCAUGC | | | | | | | | | | | | | 12-131 |
| C1562Y | SpBE3 | GCACACAUUCUCCA | 1776 | (AGG) | 20 (C12/13) | 6.0 | 45 | 47 | 69 | 21 | 61 | 24 | 6 | - | 0-1-2- |
| | | GUGAAA | | | | | | | | | | | | | 23-147 |
| C1159Y | SpBE3 | CCAUACACAACCUG | 1777 | (AAG) | 20 (C4/5) | 2.7 | 43 | 57 | 70 | 14 | 67 | 24 | 2 | - | 1-0-1- |
| | | ACAAGA | | | | | | | | | | | | | 8-88 |
| P906L/S/F | VQR- | UACGCUCCCACGGU | 1778 | (TGAA) | 20 (C10/11) | 6.6 | 47 | 53 | 59 | 10 | 44 | 46 | 6 | + | 1-0-0- |
| | SpBE3 | GGCACA | | | | | | | | | | | | | 2-33 |
| C315Y | SpBE3 | ACCACAAAGGAGAG | 1779 | (TGG) | 20 (C13/14) | 5.8 | 60 | 30 | 44 | 2 | 34 | 40 | 5 | - | 0-0-3- |
| | | CAUCUU | | | | | | | | | | | | | 19-168 |
| C1715Y | St1BE3 | ACAGUCGGGUGGCU | 1780 | (TAAGAAT) | 20 (C16/17) | 7.4 | 50 | 53 | 33 | 2 | 70 | 36 | 7 | - | 1-0-0- |
| | | UACUGU | | | | | | | | | | | | | 1-3 |
| P850L/S/F | VQR- | CUGGCCAACAUUGA | 1781 | (TGAT) | 200 () | 5.2 | 41 | 58 | 26 | 4 | 56 | 31 | 5 | - | 0-1-4- |
| | SpBE3 | ACAUGC | | | | | | | | | | | | | 23-152 |
| P1829L/S/F | SaBE3 | CUGCCCAUGGUUAG | 1782 | (CCGGAT) | 20 (C10-14) | 5.5 | 47 | 46 | 6 | 5 | 41 | 71 | 5 | - | 0-2-1- |
| | | UGGUGA | | | | | | | | | | | | | 1-13 |
| C275Y | SpBE3 | UUCGAAAACAUUUA | 1783 | (AGG) | 20 (C11/12) | 4.3 | 54 | 25 | 2 | 0 | 13 | 17 | 4 | - | 0-0-5- |
| | | UGCUUC | | | | | | | | | | | | | 15-166 |

^{a}BE types: SpBE3 = APOBEC1-SpCas9n-UGI; VQR-SpBE3 = APOBEC1-VQR-SpCas9n-UGI; EQR-SpBE3 = APOBEC1-EQR-SpCas9n-UGI; VRER-SpBE3 = APOBEC1-VRER-SpCas9n-UGI; SaBE3 = APOBEC1-SaCas9n-UGI; KKH-SaBE3 = APOBEC1-KKH-SaCas9n-UGI; St3BE3 = APOBEC1-St3Cas9n-UGI; St1BE3 = APOBEC1-St1Cas9n-UGI.
^{b}Efficiency score, based on Housden et al (Science Signaling, 2015, 8 (393):rs9).
^{c}Specificity scores based on Hsu et al (Nature biotechnology, 2013, 31 (9):827-832), Fusi et al (bioRxiv 021568; doi: http://dx.doi.org/10.1101/021568), Chari et al (Nature Methods, 2015, 12 (9):823-6), Doench et al (Nature Biotechnology, 2014, 32 (12):1262-7), Wang et al (Science, 2014, 343 (6166): 80-4), Moreno-Mateos et al (Nature Methods, 2015, 12 (10)982-8), Housden et al (Science Signaling, 2015, 8 (393):rs9), and the ″Prox/GC″ column shows ″+″ if the proximal 6 bp to the PAM has a GC count > = 4, and GG if the guide ends with GG, based on Farboud et al (Genetics, 2015, 199 (4):959-71).
^{d}Number of predicted off-target binding sites in the human genome allowing up to 0, 1, 2, 3 or 4 mismatches, respectively shown in the format 0-1-2-3-4. Algorithm used: Haeussler et al, Genome Biol. 2016; 17: 148.
^{d}Phospho-serine site S1490.

TABLE 9
Exemplary Efficiency and Specificity Scores for gRNAs for Alteration of Intron/Exon Junctions in NaV1.7 (SNA9A) Gene via
Base Editing

| | | Programmable | SEQ | | | | | | | | | | | Pro | |
|---|---|---|---|---|---|---|---|---|---|---|---|---|---|---|---|
| Target | BE | guide-RNA | ID | | gRNA size | | | | | | | M.- | Hous- | x/ | Off |
| variants | type^{a} | sequence | NOs | PAM | (C edited) | Eff^{b} | Hsu^{c} | Fusi | Chari | Doench | Wang | M. | den | GC | targets^{d} |
| acceptor, | KKH- | GCAGCACGCAGCGU | 1784 | (AAAAAT) | 20 (C15) | 6.6 | 98 | 60 | 99 | 52 | 91 | 67 | 6 | + | 0-0-0- |
| intron 9 | SaBE3 | CUAGGG | | | | | | | | | | | | | 0-8 |
| acceptor, | KKH- | GCAGCACGCAGCGU | 1785 | (AAT) | 20 (C15) | 6.6 | 98 | 60 | 99 | 52 | 91 | 67 | 6 | + | 0-0-0- |
| intron 9 | SaBE3 | CUAGGG | | | | | | | | | | | | | 0-8 |
| acceptor, | St3BE3 | GUUUAGGACCUAUA | 1786 | (TGGGG) | 20 (C10/11) | 5.6 | 97 | 71 | 97 | 40 | 89 | 30 | 5 | + | 0-0-0- |
| intron 16 | | UCAGGG | | | | | | | | | | | | | 0-18 |
| acceptor, | St1BE3 | GAUUCCAGUAAAGA | 1787 | (TGAGAAA) | 20 (C15/16) | 6.3 | 94 | 59 | 99 | 24 | 78 | 42 | 6 | - | 0-0-0- |
| intron 14 | | CCUAAG | | | | | | | | | | | | | 1-52 |
| donor, intron | KKH- | ACUUACAACUUGAA | 1788 | (ATAGGT) | 20 (C6) | 4.8 | 91 | 67 | 97 | 22 | 57 | 34 | 4 | + | 0-0-0- |
| 22 | SaBE3 | GCAGAG | | | | | | | | | | | | | 2-20 |
| acceptor, | St3BE3 | GCUAGAAACAUACC | 1789 | (TGGAG) | 20 (C14) | 4.6 | 96 | 58 | 90 | 19 | 53 | 44 | 4 | - | 0-0-0- |
| intron 26 | | UGUAUG | | | | | | | | | | | | | 1-19 |
| donor, intron | SaBE3 | ACCAGGGCACCACU | 1790 | (CAGGAT) | 20 (C2/3) | 8.4 | 86 | 70 | 97 | 37 | 55 | 49 | 8 | + | 0-0-2- |
| 19 | | GCUGAG | | | | | | | | | | | | | 7-16 |
| donor, intron | St1BE3 | AACCUCCAUACACA | 1791 | (CAAGAAA) | 20 (C16/17) | 3.4 | 98 | 61 | 84 | 25 | 77 | 29 | 3 | - | 0-0-0- |
| 19 | | ACCUGA | | | | | | | | | | | | | 0-10 |
| acceptor, | SpBE3 | GUUUAGGACCUAUA | 1792 | (TGG) | 20 (C10/11) | 5.6 | 84 | 71 | 97 | 40 | 89 | 30 | 5 | + | 0-0-1- |
| intron 16 | | UCAGGG | | | | | | | | | | | | | 6-63 |
| acceptor, | St1BE3 | AACGACCUAGUAUU | 1793 | (AAAGAAA) | 20 (C7) | 6.0 | 92 | 53 | 89 | 23 | 59 | 39 | 6 | - | 0-0-0- |
| intron 21 | | CAAAAG | | | | | | | | | | | | | 2-28 |
| donor, intron | KKH- | UUACGCAAAAACAA | 1794 | (CAAAAT) | 20 (C4) | 4.0 | 99 | 71 | 79 | 60 | 78 | 39 | 4 | - | 0-0-0- |
| 5 | SaBE3 | UGACGA | | | | | | | | | | | | | 0-10 |
| acceptor, | KKH- | CCAGUAAAGACCUA | 1795 | (AAAAAT) | 20 (C11/12) | 5.0 | 95 | 64 | 80 | 40 | 62 | 47 | 5 | - | 0-0-0- |
| intron 14 | SaBE3 | AGUGAG | | | | | | | | | | | | | 1-20 |
| acceptor, | SpBE3 | GACACUGACUACAC | 1796 | (AAG) | 20 (C9) | 4.0 | 87 | 60 | 87 | 17 | 87 | 30 | 4 | - | 0-0-1- |
| intron 8 | | ACGAGA | | | | | | | | | | | | | 5-60 |
| acceptor, | St1BE3 | UGUCUUCAGGCCUG | 1797 | (GGAGAAA) | 20 (C11/12) | 4.8 | 89 | 54 | 83 | 1 | 43 | 53 | 4 | - | 0-0-1- |
| intron 6 | | AAAAUG | | | | | | | | | | | | | 434 |
| donor, intron | VQR- | UUACCAGUCUGAAU | 1798 | (AGAA) | 20 (C4/5) | 6.6 | 92 | 62 | 80 | 68 | 64 | 12 | 6 | + | 0-0-0- |
| 15 | SpBE3 | GAUCGC | | | | | | | | | | | | | 4-58 |
| donor, intron | SpBE3 | CGUCCUUACGCUGU | 1799 | (AAG) | 20 (C9) | 7.5 | 84 | 58 | 85 | 20 | 53 | 57 | 7 | - | 0-0-0- |
| 12b | | CAUCAG | | | | | | | | | | | | | 449 |
| donor, intron | KKH- | ACUCGACAUUUUUG | 1800 | (TCCGGT) | 20 (C2) | 5.4 | 99 | 55 | 67 | 8 | 51 | 52 | 5 | + | 0-0-0- |
| 4 | SaBE3 | GUCCAG | | | | | | | | | | | | | 2-3 |
| acceptor, | VQR- | UUCCAGUAAAGACC | 1801 | (AGAA) | 20 (C13/14) | 2.7 | 74 | 68 | 91 | 13 | 62 | 33 | 2 | - | 0-0-1- |
| intron 14 | SpBE3 | UAAGUG | | | | | | | | | | | | | 9-206 |
| acceptor, | EQR- | GAUUCCAGUAAAGA | 1802 | (TGAG) | 20 (C13/14) | 6.3 | 63 | 59 | 99 | 24 | 78 | 42 | 6 | - | 0-0-1- |
| intron 14 | SpBE3 | CCUAAG | | | | | | | | | | | | | 28-179 |
| acceptor, | KKH- | GGUCGUGCCCUAAA | 1803 | (ATCAAT) | 20 (C9/10) | 6.1 | 85 | 32 | 76 | 59 | 69 | 25 | 6 | - | 0-0-0- |
| intron 12 | SaBE3 | AAAAAA | | | | | | | | | | | | | 1-14 |
| acceptor, | St3BE3 | UAGGUUUAGGACCU | 1804 | (GGGTG) | 20 (C13/14) | 6.1 | 97 | 64 | 28 | 11 | 64 | 52 | 6 | - | 0-0-0- |
| intron 16 | | AUAUCA | | | | | | | | | | | | | 0-13 |
| acceptor, | EQR- | GGACCUAUAUCAGG | 1805 | (AGAG) | 20 (C5/6) | 4.7 | 60 | 46 | 98 | 25 | 87 | 43 | 4 | + | 0-0-3- |
| intron 16 | SpBE3 | GuGGGG | | | | | | | | | | | | | 15-150 |
| acceptor, | VQR- | AGGUUUAGGACCUA | 1806 | (GGTG) | 20 (C12/13) | 5.1 | 79 | 71 | 79 | 5 | 75 | 50 | 5 | - | 0-0-1- |
| intron 16 | SpBE3 | UAUCAG | | | | | | | | | | | | | 5-100 |
| acceptor, | VQR- | ACACUGACUACACA | 1807 | (AGAA) | 20 (C8) | 3.4 | 82 | 59 | 76 | 25 | 72 | 42 | 3 | - | 0-0-0- |
| intron 8 | SpBE3 | cGAGAA | | | | | | | | | | | | | 10-130 |
| acceptor, | KKH- | GUAAAGACCUAAGU | 1808 | (AATAAT) | 20 (C8/9) | 6.9 | 75 | 50 | 82 | 55 | 84 | 26 | 6 | - | 0-0-1- |
| intron 14 | SaBE3 | GAGAAA | | | | | | | | | | | | | 7-59 |
| acceptor, | SpBE3 | ACGCAGCGUCUAGG | 1809 | (TGG) | 20 (C10) | 6.7 | 75 | 37 | 82 | 30 | 40 | 48 | 6 | - | 0-0-0- |
| intron 9 | | GAAAAA | | | | | | | | | | | | | 2-73 |
| donor, intron | VQR- | UUACUUGCAACCUA | 1810 | (CGAT) | 20 (C4) | 3.9 | 93 | 63 | 63 | 74 | 59 | 45 | 3 | + | 0-0-0- |
| 1 | SpBE3 | GCCCGC | 345 | | | | | | | | | | | | |
| donor, intron | KKH- | GGACACUUACAACU | 1811 | (AGAGAT) | 20 (C10) | 7.3 | 95 | 53 | 61 | 39 | 72 | -6 | 7 | - | 0-0-0- |
| 22 | SaBE3 | UGAAGC | | | | | | | | | | | | | 0-8 |
| acceptor, | KKH- | GAUUGGUCGUGCCC | 1812 | (AAAAAT) | 20 (C13/14) | 4.5 | 98 | 25 | 56 | 39 | 70 | 40 | 4 | - | 0-0-0- |
| intron 12 | SaBE3 | UAAAAA | | | | | | | | | | | | | 0-4 |
| acceptor, | VQR- | CUGGACACUGACUA | 1813 | (AGAA) | 20 (C12) | 5.5 | 85 | 69 | 69 | 75 | 67 | 61 | 5 | + | 0-0-1- |
| intron 8 | SpBE3 | CACACG | | | | | | | | | | | | | 7-86 |
| acceptor, | KKH- | AAACAUACCUGUAU | 1814 | (GAAAAT) | 20 (C9) | 6.2 | 90 | 63 | 62 | 15 | 70 | 43 | 6 | + | 0-0-0- |
| intron 26 | SaBE3 | GUGGAG | | | | | | | | | | | | | 1-20 |
| donor, intron | SpBE3 | UUUACCAGUCUGAA | 1815 | (CAG) | 20 (C5/6) | 6.4 | 83 | 69 | 70 | 50 | 57 | 26 | 6 | - | 0-0-2- |
| 15 | | UGAUCG | | | | | | | | | | | | | 3-86 |
| acceptor, | St3BE3 | ACCUAUAUCAGGGU | 1816 | (AGGGG) | 20 (C3/4) | 6.9 | 72 | 44 | 80 | 9 | 53 | 40 | 6 | + | 0-0-0- |
| intron 16 | | GGGGAG | | | | | | | | | | | | | 7-85 |
| acceptor, | St3BE3 | UUAGGACCUAUAUC | 1817 | (GGGAG) | 20 (C8/9) | 3.9 | 91 | 61 | 41 | 40 | 66 | 73 | 3 | + | 0-0-1- |
| intron 16 | | AGGGUG | | | | | | | | | | | | | 7-60 |
| acceptor, | St1BE3 | UCACAACGACCUAG | 1818 | (AAAGAAA) | 20 (C11) | 5.7 | 99 | 50 | 52 | 1 | 31 | 15 | 5 | - | 0-0-0- |
| intron 21 | | UAUUCA | | | | | | | | | | | | | 0-9 |
| acceptor, | KKH- | UUGUUCUGCAAAGA | 1819 | (AATAAT) | 20 (C6) | 5.6 | 67 | 43 | 84 | 47 | 61 | 41 | 5 | - | 0-0-2- |
| intron 25 | SaBE3 | AAUAAG | | | | | | | | | | | | | 9-62 |
| acceptor, | St1BE3 | CCUGUAUGUGGAGG | 1820 | (ATAGAAA) | 20 (C2) | 4.2 | 85 | 31 | 66 | 7 | 36 | 50 | 4 | - | 0-0-0- |
| intron 26 | | AAAAUA | | | | | | | | | | | | | 749 |
| donor, intron | St1BE3 | AAAACGUCCUUACG | 1821 | (TCAGAAG) | 20 (C13) | 3.6 | 98 | 53 | 27 | 2 | 65 | 30 | 3 | - | 0-0-0- |
| 12b | | CUGUCA | | | | | | | | | | | | | 1-8 |
| acceptor, | VQR- | UCUUCAGGCCUGAA | 1822 | (AGAA) | 20 (C9/10) | 6.6 | 56 | 67 | 94 | 74 | 77 | 54 | 6 | - | 0-0-2- |
| intron 6 | SpBE3 | AAUGGG | | | | | | | | | | | | | 23-213 |
| donor, intron | SaBE3 | UAUUUUUUUACCCC | 1823 | (AGGAAT) | 20 (C11/12) | 3.7 | 98 | 52 | 35 | 18 | 59 | 24 | 3 | + | 0-0-0- |
| 25 | | UGGUCG | | | | | | | | | | | | | 0-10 |
| donor, intron | KKH- | ACUUACUUGCAACC | 1824 | (GCCGAT) | 20 (C6) | 7.2 | 97 | 52 | 36 | 31 | 74 | 14 | 7 | + | 0-0-0- |
| 1 | SaBE3 | UAGCCC | | | | | | | | | | | | | 2-9 |
| donor, intron | VQR- | AUUUUUUUACCCCU | 1825 | (GGAA) | 20 (C10/11) | 8.0 | 83 | 60 | 66 | 49 | 47 | 32 | 8 | + | 0-0-1- |
| 25 | SpBE3 | GGUCGA | | | | | | | | | | | | | 12-133 |
| acceptor, | VQR- | UACUAUGAAAGUCU | 1826 | (GGAA) | 20 (C13) | 5.3 | 62 | 63 | 86 | 28 | 64 | 37 | 5 | + | 0-0-5- |
| intron 2 | SpBE3 | GCAGGA | | | | | | | | | | | | | 14-194 |
| donor, intron | VQR- | AAUAUUCUUACCUA | 1827 | (AGAT) | 20 (C11/12) | 4.2 | 63 | 62 | 85 | 15 | 80 | 51 | 4 | - | 0-0-2- |
| 26 | SpBE3 | CAAUGG | | | | | | | | | | | | | 22-264 |
| acceptor, | SaBE3 | ACCUAAACACAAGA | 1828 | (TGGGAT) | 20 (C2/3) | 6.7 | 91 | 56 | 28 | 11 | 58 | 26 | 6 | - | 0-0-1- |
| intron 4 | | UUCCAU | | | | | | | | | | | | | 1-18 |
| acceptor, | KKH- | AGAGGCCUGGAUGG | 1829 | (AGAAAT) | 20 (C6/7) | 6.8 | 80 | 60 | 66 | 52 | 81 | 75 | 6 | - | 0-0-3- |
| intron 1 | SaBE3 | AAACAA | | | | | | | | | | | | | 3-20 |
| donor, intron | KKH- | AGUACCUACAUCAA | 1830 | (GGAAAT) | 20 (C9) | 4.6 | 87 | 41 | 59 | 9 | 46 | 33 | 4 | - | 0-0-1- |
| 20 | SaBE3 | CAAUUA | | | | | | | | | | | | | 4-23 |
| donor, intron | SpBE3 | GACACUUACAACUU | 1831 | (GAG) | 20 (C9) | 5.3 | 62 | 63 | 83 | 47 | 76 | 33 | 5 | - | 0-0-4- |
| 22 | | GAAGCA | | | | | | | | | | | | | 13-121 |
| acceptor, | SpBE3 | CCAUACACAACCUG | 1832 | (AAG) | 20 (C11/12) | 2.7 | 74 | 57 | 70 | 14 | 67 | 24 | 2 | - | 0-0-1- |
| intron 18 | | ACAAGA | | | | | | | | | | | | | 8-88 |
| acceptor, | KKH- | CGCAGCGUCUAGGG | 1833 | (GGAAAT) | 20 (C9) | 6.0 | 98 | 44 | 17 | 28 | 29 | 52 | 6 | - | 0-0-0- |
| intron 9 | SaBE3 | AAAAAU | | | | | | | | | | | | | 0-2 |
| donor, intron | SpBE3 | GAGACUUACCAAAU | 1834 | (TAG) | 20 (C5/6) | 7.4 | 67 | 49 | 75 | 14 | 77 | 32 | 7 | - | 0-0-1- |
| 14 | | UUCCUA | | | | | | | | | | | | | 18-121 |
| acceptor, | St3BE3 | UUGUCUUCAGGCCU | 1835 | (GGGAG) | 20 (C12/13) | 5.8 | 92 | 49 | 33 | 25 | 32 | 59 | 5 | - | 0-0-1- |
| intron 6 | | GAAAAU | | | | | | | | | | | | | 3-22 |
| donor, intron | KKH- | UUCUUACCUGGGAU | 1836 | (AATAGT) | 20 (C7/8) | 5.3 | 89 | 52 | 37 | 17 | 49 | 45 | 5 | - | 0-0-1- |
| 6 | SaBE3 | UACAGA | | | | | | | | | | | | | 2-14 |
| acceptor, | SpBE3 | UUUAGGACCUAUAU | 1837 | (GGG) | 20 (C9/10) | 7.5 | 80 | 60 | 15 | 17 | 69 | 48 | 7 | + | 0-0-1- |
| intron 16 | | CAGGGU | | | | | | | | | | | | | 11-87 |
| donor, intron | KKH- | AACGUCCUUACGCU | 1838 | (AGAAGT) | 20 (C11) | 6.4 | 95 | 45 | 34 | 4 | 28 | 46 | 6 | - | 0-0-0- |
| 12b | SaBE3 | GUCAUC | | | | | | | | | | | | | 1-4 |
| acceptor, | SpBE3 | AGGACCUAUAUCAG | 1839 | (GAG) | 20 (C6/7) | 5.1 | 50 | 53 | 89 | 8 | 64 | 72 | 5 | + | 0-0-3- |
| intron 16 | | GGUGGG | | | | | | | | | | | | | 23-231 |
| acceptor, | SpBE3 | UUAGGACCUAUAUC | 1840 | (GGG) | 20 (C8/9) | 3.9 | 77 | 61 | 41 | 40 | 66 | 73 | 3 | + | 0-0-1- |
| intron 16 | | AGGGUG | | | | | | | | | | | | | 19-153 |
| acceptor, | EQR- | UGUCUUCAGGCCUG | 1841 | (GGAG) | 20 (C11/12) | 4.8 | 55 | 54 | 83 | 1 | 43 | 53 | 4 | - | 0-0-3- |
| intron 6 | SpBE3 | AAAAUG | | | | | | | | | | | | | 26-246 |
| donor, intron | St3BE3 | AUAAAUAUUCUUAC | 1842 | (TGGAG) | 20 (C14/15) | 5.7 | 88 | 50 | 27 | 15 | 59 | 35 | 5 | - | 0-0-1- |
| 26 | | CUACAA | | | | | | | | | | | | | 5-55 |
| acceptor, | KKH- | CAUACCUGUAUGUG | 1843 | (AATAAT) | 20 (C6) | 4.3 | 81 | 56 | 50 | 6 | 48 | 42 | 4 | - | 0-0-0- |
| intron 26 | SaBE3 | GAGGAA | | | | | | | | | | | | | 1-28 |
| donor, intron | St1BE3 | GUUUACCAGUCUGA | 1844 | (GCAGAAC) | 20 (C6/7) | 6.1 | 94 | 43 | 23 | 1 | 42 | 38 | 6 | - | 0-0-0- |
| 15 | | AUGAUC | | | | | | | | | | | | | 3-14 |
| donor, ntron | VQR- | GAUUAUUACAUACC | 1845 | (AGTG) | 20 (C13/14) | 3.4 | 76 | 55 | 60 | 7 | 73 | 28 | 3 | - | 0-0-0- |
| 13 | SpBE3 | UUCCAC | | | | | | | | | | | | | 7-137 |
| donor, intron | SpBE3 | UCACCUUUUUGUCU | 1846 | (TAG) | 20 (C4/5) | 5.9 | 65 | 45 | 71 | 6 | 42 | 16 | 5 | - | 0-0-1- |
| 2 | | GCAUAG | | | | | | | | | | | | | 21-176 |
| acceptor, | St1BE3 | AUGAAAGUCUGCAG | 1847 | (AAAGAAA) | 20 (C9) | 5.0 | 77 | 52 | 58 | 14 | 63 | 44 | 5 | - | 0-0-1- |
| intron 2 | | GAGGAA | | | | | | | | | | | | | 4-118 |
| donor, intron | SpBE3 | AAACGUCCUUACGC | 1848 | (CAG) | 20 (C12) | 5.6 | 82 | 53 | 14 | 14 | 46 | 62 | 5 | - | 0-0-1- |
| 12b | | UGUCAU | | | | | | | | | | | | | 14-25 |
| donor, intron | KKH- | CACUUACUCGACAU | 1849 | (TCCAGT) | 20 (C7) | 6.5 | 91 | 44 | 39 | 51 | 51 | 39 | 6 | - | 0-0-0- |
| 4 | SaBE3 | UUUUGG | | | | | | | | | | | | | 1-7 |
| donor, intron | KKH- | CUUGGUACUCACCU | 1850 | (AAAGGT) | 20 (C12/13) | 9.4 | 92 | 43 | 29 | 31 | 42 | 39 | 9 | - | 0-0-2- |
| 9 | SaBE3 | GUUGGU | | | | | | | | | | | | | 1-11 |
| acceptor, | VQR- | GCAAUUGCCUGGUU | 1851 | (AGAC) | 20 (C8/9) | 5.6 | 79 | 54 | 55 | 36 | 82 | 49 | 5 | + | 0-0-2- |
| intron 10 | SpBE3 | GGGCCA | | | | | | | | | | | | | 9-83 |
| donor, intron | VQR- | AACGUCCUUACGCU | 1852 | (AGAA) | 20 (C11) | 6.4 | 89 | 45 | 34 | 4 | 28 | 46 | 6 | - | 0-0-0- |
| 12b | SpBE3 | GUCAUC | | | | | | | | | | | | | 2-33 |
| acceptor, | VQR- | CAUACACAACCUGA | 1853 | (AGAC) | 20 (C10/11) | 7.1 | 50 | 54 | 84 | 9 | 48 | 51 | 7 | - | 0-0-5- |
| intron 18 | SpBE3 | CAAGAA | | | | | | | | | | | | | 39-478 |
| acceptor, | St1BE3 | AAGUUCUGGGAGAA | 1854 | (AGAGAAC) | 20 (C6) | 4.9 | 81 | 52 | 40 | 6 | 73 | 43 | 4 | - | 0-0-0- |
| intron 13 | | AAAAGC | | | | | | | | | | | | | 13-84 |
| donor, intron | KKH- | UGGUUACAUACCAC | 1855 | (TCCAAT) | 20 (C12) | 4.5 | 91 | 42 | 10 | 3 | 43 | 55 | 4 | - | 0-0-0- |
| 16 | SaBE3 | CAGGUU | | | | | | | | | | | | | 3-12 |
| acceptor, | St1BE3 | UGCCUUUAAGAAUA | 1856 | (ATAGAAT) | 20 (C3/4) | 2.9 | 84 | 21 | 48 | 4 | 33 | 14 | 2 | - | 0-0-0- |
| intron 22 | | ACAUUA | | | | | | | | | | | | | 7-68 |
| acceptor, | St1BE3 | UAAGAGGCCUGGAU | 1857 | (AAAGAAA) | 20 (C8/9) | 6.2 | 93 | 36 | 37 | 6 | 53 | 50 | 6 | - | 0-0-0- |
| intron 1 | | GGAAAC | | | | | | | | | | | | 1 | -38 |
| donor, intron | EQR- | GGACACUUACAACU | 1858 | (AGAG) | 20 (C9) | 7.3 | 69 | 53 | 61 | 39 | 72 | -6 | 7 | - | 0-0-2- |
| 22 | SpBE3 | UGAAGC | | | | | | | | | | | | | 11-129 |
| donor, intron | SpBE3 | UAUUUUUUUACCCC | 1859 | (AGG) | 20 (C11/12) | 3.7 | 78 | 52 | 35 | 18 | 59 | 24 | 3 | + | 0-0-1- |
| 25 | | UGGUCG | | | | | | | | | | | | | 12-87 |
| donor, intron | KKH- | AUACCCACUUACUC | 1860 | (TTTGGT) | 20 (C12) | 5.4 | 99 | 30 | 18 | 16 | 27 | 33 | 5 | - | 0-0-0- |
| 4 | SaBE3 | GACAUU | | | | | | | | | | | | | 0-4 |
| donor, intron | SpBE3 | CUUACUCGACAUUU | 1861 | (CAG) | 20 (C5) | 8.7 | 80 | 48 | 9 | 12 | 32 | 31 | 8 | - | 0-0-0- |
| 4 | | UUGGUC | | | | | | | | | | | | | 5-56 |
| donor, intron | SpBE3 | UGGUACUCACCUGU | 1862 | (AGG) | 20 (C10/11) | 8.3 | 82 | 46 | 2 | 20 | 44 | 52 | 8 | - | 0-0-1- |
| 9 | | UGGUAA | | | | | | | | | | | | | 9-84 |
| acceptor, | SaBE3 | AAUAGGUUUAGGAC | 1863 | (CAGGGT) | 20 (C15/16) | 4.3 | 91 | 36 | 7 | 5 | 43 | 34 | 4 | - | 0-0-0- |
| intron 16 | | CUAUAU | | | | | | | | | | | | | 6-11 |
| acceptor, | VQR- | ACAACGACCUAGUA | 1864 | (AGAA) | 20 (C9) | 4.1 | 76 | 51 | 50 | 41 | 66 | 31 | 4 | - | 0-0-0- |
| intron 21 | SpBE3 | UUCAAA | | | | | | | | | | | | | 4-113 |
| acceptor, | SaBE3 | GCCUUUAAGAAUAA | 1865 | (TAGAAT) | 20 (C2/3) | 5.9 | 89 | 24 | 38 | 3 | 42 | 26 | 5 | - | 0-0-0- |
| intron 22 | | CAUUAA | | | | | | | | | | | | | 1-38 |
| donor, intron | SpBE3 | GGGUGGUACCUGAU | 1866 | (TAG) | 20 (C9/10) | 7.7 | 70 | 47 | 57 | 17 | 90 | 60 | 7 | + | 0-0-2- |
| 11 | | UGGGGG | | | | | | | | | | | | | 12-152 |
| acceptor, | SpBE3 | ACGACCUAGUAUUC | 1867 | (AAG) | 20 (C6) | 4.9 | 72 | 54 | 45 | 16 | 69 | 33 | 4 | - | 0-0-1- |
| intron 21 | | AAAAGA | | | | | | | | | | | | | 6-79 |
| acceptor, | VQR- | GAAACAUACCUGUA | 1868 | (GGAA) | 20 (C10) | 4.9 | 63 | 63 | 60 | 33 | 66 | 45 | 4 | - | 0-0-0- |
| intron 26 | SpBE3 | UGUGGA | | | | | | | | | | | | | 21-206 |
| donor, intron | KKH- | UAAACUCACCUUUU | 1869 | (CATAGT) | 20 (C9/10) | 8.0 | 57 | 57 | 68 | 6 | 42 | 37 | 8 | - | 0-0-1- |
| 2 | SaBE3 | UGUCUG | | | | | | | | | | | | | 5-21 |
| donor, intron | VQR- | UACAUACCCUGAAU | 1870 | (TGAA) | 20 (C7/8) | 5.8 | 75 | 50 | 8 | 6 | 62 | 12 | 5 | + | 0-0-0- |
| 8 | SpBE3 | CUGUGC | | | | | | | | | | | | | 15-118 |
| acceptor, | EQR- | CUAGAAACAUACCU | 1871 | (GGAG) | 20 (C13) | 6.2 | 66 | 58 | 16 | 18 | 50 | 34 | 6 | - | 0-0-0- |
| intron 26 | SpBE3 | GUAUGU | | | | | | | | | | | | | 19-215 |
| acceptor, | VQR- | CGACCUAGUAUUCA | 1872 | (AGAA) | 20 (C5) | 3.6 | 59 | 51 | 64 | 20 | 65 | 43 | 3 | - | 0-0-1- |
| intron 21 | SpBE3 | AAAGAA | | | | | | | | | | | | | 10-143 |
| acceptor, | KKH- | AAGUUGCCUUUAAG | 1873 | (ATTAAT) | 20 (C7/8) | 4.4 | 87 | 36 | 23 | 11 | 39 | 38 | 4 | - | 0-0-0- |
| intron 22 | SaBE3 | AAUAAC | | | | | | | | | | | | | 735 |
| donor, intron | VQR- | GGUGGUACCUGAUU | 1874 | (AGAC) | 20 (C8/9) | 6.8 | 73 | 50 | 43 | 22 | 78 | 63 | 6 | + | 0-0-5- |
| 11 | SpBE3 | GGGGGu | | | | | | | | | | | | | 13-84 |
| donor, intron | St3BE3 | CACCUUUUUGUCUG | 1875 | (AGGGG) | 20 (C3/4) | 3.8 | 91 | 32 | 7 | 1 | 13 | 41 | 3 | - | 0-0-0- |
| 2 | | CAUAGU | | | | | | | | | | | | | 2-31 |
| acceptor, | SpBE3 | ACCUAAACACAAGA | 1876 | (TGG) | 20 (C2/3) | 6.7 | 66 | 56 | 28 | 11 | 58 | 26 | 6 | - | 0-0-3- |
| intron 4 | | UUCCAU | | | | | | | | | | | | | 17-119 |
| acceptor, | VQR- | CGCAGCGUCUAGGG | 1877 | (GGAA) | 20 (C9) | 6.0 | 78 | 44 | 17 | 28 | 29 | 52 | 6 | - | 0-0-0- |
| intron 9 | SpBE3 | AAAAAU | | | | | | | | | | | | | 4-61 |
| donor, intron | St3BE3 | AAUUUGGGUGGUAC | 1878 | (GGGGG) | 20 (C14/15) | 5.3 | 96 | 26 | 9 | 2 | 36 | 67 | 5 | - | 0-0-0- |
| 11 | | CUGAUU | | | | | | | | | | | | | 3-31 |
| donor, intron | SpBE3 | CCUUUUUGUCUGCA | 1879 | (GGG) | 20 (C1/2) | 6.0 | 66 | 56 | 38 | 61 | 59 | 37 | 6 | - | 0-0-3- |
| 2 | | UAGUAG | | | | | | | | | | | | | 22-194 |
| donor, intron | SpBE3 | UUUACCCCUGGUCG | 1880 | (TGG) | 20 (C5/6) | 5.1 | 89 | 33 | 8 | 13 | 26 | 52 | 5 | - | 0-0-0- |
| 25 | | AGGAAU | | | | | | | | | | | | | 8-52 |
| donor, intron | VQR- | UACUUACGCAAAAA | 1881 | (CGAC) | 20 (C7) | 4.1 | 56 | 62 | 66 | 22 | 75 | 29 | 4 | - | 0-0-2- |
| 5 | SpBE3 | CAAUGA | | | | | | | | | | | | | 14-257 |
| acceptor, | SaBE3 | CCUAUAUCAGGGUG | 1882 | (GGGGGT) | 20 (C2/3) | 3.8 | 76 | 45 | 25 | 4 | 47 | 56 | 3 | + | 0-0-0- |
| intron 16 | | GGGAGA | | | | | | | | | | | | | 1-30 |
| donor, intron | SaBE3 | AAUUUGGGUGGUAC | 1883 | (GGGGGT) | 20 (C14/15) | 5.3 | 95 | 26 | 9 | 2 | 36 | 67 | 5 | - | 0-0-0- |
| 11 | | CUGAUU | | | | | | | | | | | | | 2-5 |
| donor, intron | SpBE3 | UUGGUACUCACCUG | 1884 | (AAG) | 20 (C11/12) | 3.7 | 83 | 38 | 12 | 0 | 37 | 54 | 3 | - | 0-0-1- |
| 9 | | UUGGUA | | | | | | | | | | | | | |
| donor, intron | EQR- | AUUUACCAGGGCAC | 1885 | (TGAG) | 20 (C6/7) | 6.4 | 67 | 40 | 53 | 1 | 55 | 10 | 6 | + | 0-0-3- |
| 19 | SpBE3 | CACUGC | | | | | | | | | | | | | 22-108 |
| donor, intron | KKH- | ACAUACCUUCCACA | 1886 | (GTTAAT) | 20 (C6/7) | 6.3 | 79 | 41 | 30 | 13 | 33 | 31 | 6 | - | 0-0-0- |
| 13 | SaBE3 | GUGUUU | | | | | | | | | | | | | 3-38 |
| donor, intron | KKH- | CACCUGUUGGUAAA | 1887 | (CCCAGT) | 20 (C3/4) | 5.2 | 93 | 26 | 7 | 3 | 7 | 27 | 5 | - | 0-0-0- |
| 9 | SaBE3 | GGUUUU | | | | | | | | | | | | | 1-14 |
| donor, intron | KKH- | GACUUACCAAAUUU | 1888 | (GCAAGT) | 20 (C7/8) | 6.2 | 83 | 35 | 29 | 15 | 36 | 52 | 6 | - | 0-0-0- |
| 14 | SaBE3 | CCUAUA | | | | | | | | | | | | | 4-31 |
| donor, intron | VQR- | ACACUUACAACUUG | 1889 | (AGAT) | 20 (C8) | 3.5 | 55 | 63 | 62 | 38 | 87 | 45 | 3 | - | 0-0-9- |
| 22 | SpBE3 | AAGCAG | | | | | | | | | | | | | 16-173 |
| donor, intron | St1BE3 | AUUACUUCUUACCU | 1890 | (ACAGAAA) | 20 (C12/13) | 7.0 | 91 | 27 | 13 | 3 | 29 | 37 | 7 | - | 0-0-1- |
| 6 | | GGGAUU | | | | | | | | | | | | | 4-30 |
| acceptor, | SpBE3 | UGCAAUUGCCUGGU | 1891 | (AAG) | 20 (C9/10) | 7.8 | 74 | 43 | 11 | 8 | 40 | 37 | 7 | + | 0-0-1- |
| intron 10 | | UGGGCC | | | | | | | | | | | | | 15-146 |
| acceptor, | SpBE3 | CGGAGCUAAAAGCA | 1892 | (AAG) | 20 (C6) | 4.6 | 65 | 35 | 52 | 11 | 36 | 46 | 4 | - | 0-0-2- |
| intron 15 | | AAUAUA | | | | | | | | | | | | | 16-105 |
| acceptor, | KKH- | CUCGGAGCUAAAAG | 1893 | (TAAAGT) | 20 (C8) | 4.8 | 88 | 28 | 29 | 7 | 33 | 42 | 4 | - | 0-0-0- |
| intron 15 | SaBE3 | CAAAUA | | | | | | | | | | | | | 1-16 |
| donor, intron | SaBE3 | CACCUUUUUGUCUG | 1894 | (AGGGGT) | 20 (C3/4) | 3.8 | 84 | 32 | 7 | 1 | 13 | 41 | 3 | - | 0-0-1- |
| 2 | | CAUAGU | | | | | | | | | | | | | 15-17 |
| donor, intron | SpBE3 | AACUCACCUUUUUG | 1895 | (TAG) | 20 (C7/8) | 3.7 | 65 | 49 | 12 | 13 | 29 | 20 | 3 | - | 0-0-0- |
| 2 | | UCUGCA | | | | | | | | | | | | | 20-206 |
| acceptor, | VQR- | AGAGGCCUGGAUGG | 1896 | (AGAA) | 20 (C6/7) | 6.8 | 46 | 60 | 66 | 52 | 81 | 75 | 6 | - | 0-0-5- |
| intron 1 | SpBE3 | AAACAA | | | | | | | | | | | | | 54-404 |
| donor, intron | VQR- | AGUACCUACAUCAA | 1897 | (GGAA) | 20 (C9) | 4.6 | 52 | 41 | 59 | 9 | 46 | 33 | 4 | - | 0-0-3- |
| 20 | SpBE3 | CAAUUA | | | | | | | | | | | | | 53-739 |
| acceptor, | SaBE3 | AUAAAAAUAUUCUG | 1898 | (AAGAAT) | 20 (C12) | 3.8 | 58 | 53 | 50 | 8 | 53 | 22 | 3 | - | 0-0-8- |
| intron 7 | | UUGAAG | | | | | | | | | | | | | 13-102 |
| acceptor, | St3BE3 | CCUAUAUCAGGGUG | 1899 | (GGGGG) | 20 (C2/3) | 3.8 | 64 | 45 | 25 | 4 | 47 | 56 | 3 | + | 0-0-0- |
| intron 16 | | GGGAGA | | | | | | | | | | | | | 12-144 |
| acceptor, | KKH- | UGUCUACCUAUAAA | 1900 | (AAAAGT) | 20 (C7/8) | 4.3 | 78 | 31 | 9 | 17 | 26 | 16 | 4 | - | 0-0-0- |
| intron 23 | SaBE3 | AUUUAC | | | | | | | | | | | | | 3-55 |
| acceptor, | St1BE3 | UAAAUACCUGUAGA | 1901 | (TCAGAAT) | 20 (C7/8) | 4.1 | 68 | 16 | 41 | 10 | 40 | 39 | 4 | - | 0-0-1- |
| intron 5 | | AUUAAA | | | | | | | | | | | | | 17-167 |
| donor, intron | SpBE3 | ACCCACUUACUCGA | 1902 | (TGG) | 20 (C10) | 7.1 | 86 | 20 | 8 | 4 | 7 | 12 | 7 | - | 0-0-1- |
| 4 | | CAUUUU | | | | | | | | | | | | | 4-58 |
| acceptor, | St1BE3 | GAUUUUGUUCUGCA | 1903 | (TAAGAAT) | 20 (C10) | 5.9 | 68 | 35 | 37 | 15 | 76 | 33 | 5 | - | 0-0-3- |
| intron 25 | | AAGAAA | | | | | | | | | | | | | 16-104 |
| donor, intron | KKH- | UUACCCUCAUUCCU | 1904 | (CTAGAT) | 20 (C4/5) | 5.2 | 64 | 40 | 20 | 51 | 30 | 21 | 5 | - | 0-1-1- |
| 21 | SaBE3 | UCAAAU | | | | | | | | | | | | | 3-19 |
| donor, intron | EQR- | UAUAUUUUUUUACC | 1905 | (CGAG) | 20 (C13/14) | 4.1 | 51 | 53 | 36 | 12 | 37 | 25 | 4 | + | 0-0-3- |
| 25 | SpBE3 | ccuGGu | | | | | | | | | | | | | 38-413 |
| donor, intron | KKH- | UAGUACACUCAUAU | 1906 | (AAAAAT) | 20 (C8/10) | 9.1 | 90 | 10 | 4 | 4 | 18 | 42 | 9 | - | 0-0-0- |
| 3 | SaBE3 | ccuuuu | | | | | | | | | | | | | 2-26 |
| donor, intron | VQR- | ACCCUCAUUCCUUC | 1907 | (AGAT) | 20 (C2/3) | 5.6 | 62 | 36 | 3 | 1 | 28 | 12 | 5 | - | 0-0-4- |
| 21 | SpBE3 | AAAUCU | | | | | | | | | | | | | 22-199 |
| donor, intron | VQR- | AAUAUUACAUACCC | 1908 | (TGTG) | 20 (C12/13) | 4.5 | 63 | 31 | 16 | 2 | 39 | 12 | 4 | - | 0-0-2- |
| 8 | SpBE3 | UGAAUC | | | | | | | | | | | | | 13-223 |
| donor, intron | SpBE3 | AAGUACCUACAUCA | 1909 | (AGG) | 20 (C10) | 6.6 | 53 | 40 | 36 | 16 | 43 | 42 | 6 | - | 0-0-8- |
| 20 | | ACAAUU | | | | | | | | | | | | | 38-315 |
| donor, intron | SpBE3 | CACCUUUUUGUCUG | 1910 | (AGG) | 20 (C3/4) | 3.8 | 60 | 32 | 7 | 1 | 13 | 41 | 3 | - | 0-0-3- |
| 2 | | CAUAGU | | | | | | | | | | | | | 25-159 |
| donor, intron | SpBE3 | UUACAACUUGAAGC | 1911 | (AGG) | 20 (C4) | 4.6 | 41 | 47 | 37 | 45 | 44 | 56 | 4 | - | 0-0-10- |
| 22 | | AGAGAU | | | | | | | | | | | | | 36-283 |

^{a}BE types: SpBE3 = APOBEC1-SpCas9n-UGI; VQR-SpBE3 = APOBEC1-VQR-SpCas9n-UGI; EQR-SpBE3 = APOBEC1-EQR-SpCas9n-UGI; VRER-SpBE3 = APOBEC1-VRER-SpCas9n-UGI; SaBE3 = APOBEC1-SaCas9n-UGI; KKH-SaBE3 = APOBEC1-KKH-SaCas9n-UGI; St3BE3 = APOBEC1-St3Cas9n-UGI; St1BE3 = APOBEC1-St1Cas9n-UGI.
^{b}Efficiency score, based on Housden et al (Science Signaling, 2015, 8 (393):rs9).
^{c}Specificity scores based on Hsu et al (Nature biotechnology, 2013, 31 (9):827-832), Fusi et al (bioRxiv 021568; doi: http://dx.doi.org/10.1101/021568), Chari et al (Nature Methods, 2015, 12 (9):823-6), Doench et al (Nature Biotechnology, 2014, 32 (12):1262-7), Wang et al (Science, 2014, 343 (6166): 80-4), Moreno-Mateos et al (Nature Methods, 2015, 12 (10)982-8), Housden et al (Science Signaling, 2015, 8 (393):rs9), and the ″Prox/GC″ column shows ″+″ if the proximal 6 bp to the PAM has a GC count > = 4, and GG if the guide ends with GG, based on Farboud et al (Genetics, 2015, 199 (4):959-71).
^{d}Number of predicted off-target binding sites in the human genome allowing up to 0, 1, 2, 3 or 4 mismatches, respectively shown in the format 0-1-2-3-4. Algorithm used: Haeussler et al, Genome Biol. 2016; 17: 148. Isoform 2 is expressed preferentially in the dorsal root ganglion.

### Editing the SCN9A Gene Using Cas9 Nuclease or Cas9 Nickase Pairs

[0110] In some embodiments, the editing of an ion channel-encoding polynucleotide (e.g., SCN9A gene) may be achieved using Cas9 nucleases, or Cas9 nickase pairs (e.g., as described in Ran et al., Cell. 2013 Sep. 12; 154(6): 1380-1389, incorporated herein by reference. Cas9 nuclease or Cas9 nickase pairs introduce double stranded DNA break in the ion channel-encoding polynucleotide (e.g., SCN9A gene). Indels may be introduced when the double strand break is repaired by the cellular double strand break repair system, causing loss-of-function SCN9A mutants. The use of Cas9 nuclease to generate SCN9A mutation have been described in the art, e.g., in Sun et al., Transl Perioper Pain Med. 2016; 1(3): 22-33, incorporated herein by reference.

[0111] Nonetheless, provided herein are top-scoring guide-RNA target sites in SCN9A gene using these alternative genome editing agents (Table 10 and Table 11).

TABLE 10
Top-Scoring Guide-RNA Target Sites and PAM Sequences in SCN9A for
Cas9 Nuclease

| | | | Guide- | SEQ ID | Specificity | Efficiency |
|---|---|---|---|---|---|---|
| Entry | Position | Strand | RNA target site (PAM) | NOs | score⁵⁰ | score²⁸ |
| 1 | 350 | -1 | GAGCACGGGCGAAAGACCGA (GGG) | 1912 | 94 | 67 |
| 2 | 439 | 1 | GTATTACGCCACCTGGAAAG (AAG) | 1913 | 81 | 70 |
| 3 | 532 | -1 | ACAGAGTCAAAACCGCACAG (GAG) | 1914 | 84 | 89 |
| 4 | 534 | -1 | CCACAGAGTCAAAACCGCAC (AGG) | 1915 | 84 | 60 |
| 5 | 753 | 1 | AGCTTAGCAGATACAACCTG (TGG) | 1916 | 60 | 72 |
| 6 | 755 | 1 | CTTAGCAGATACAACCTGTG (GGG) | 1917 | 70 | 73 |
| 7 | 837 | 1 | TCTGCCCCTATTTCTCAGCG (CAG) | 1918 | 75 | 83 |
| 8 | 1555 | -1 | TCATGAAAATTTGCGACACA (GGG) | 1919 | 84 | 66 |
| 9 | 2064 | -1 | CTACTTTTTTCCTTGCCACA (GAG) | 1920 | 51 | 81 |
| 10 | 2380 | -1 | GCTGAAATGGAGTAATAAGG (AAG) | 1921 | 61 | 85 |
| 11 | 2596 | -1 | ATAGAGAATGAATTGCAGGG (GAG) | 1922 | 52 | 87 |
| 12 | 2846 | -1 | ATGTGTTTTAGCCACGACCT (GGG) | 1923 | 90 | 62 |
| 13 | 3685 | -1 | AAACATCAATTTAGACCGTG (TGG) | 1924 | 83 | 64 |
| 14 | 5589 | -1 | AAAACATTAGCCGGGCACGG (TGG) | 1925 | 78 | 71 |
| 15 | 5724 | -1 | AGATAATGGGCTGAGCGCGG (TGG) | 1926 | 88 | 65 |
| 16 | 6504 | 1 | GGCCTACTCAGGGATCAACT (GGG) | 1927 | 82 | 66 |
| 17 | 7409 | 1 | GGAGTGCAGTGGTACGATGT (TGG) | 1928 | 89 | 62 |
| 18 | 7790 | -1 | TGGTCATGAGGATTTAAACG (GAG) | 1929 | 77 | 77 |
| 19 | 7963 | 1 | CCCCACACAGATATACCTGG (TGG) | 1930 | 69 | 76 |
| 20 | 7967 | -1 | TGCTTGGTAGCGTAACCACC (AGG) | 1931 | 92 | 61 |
| 21 | 8465 | 1 | ACGCCCGTAATCCAGCACTT (TGG) | 1932 | 89 | 67 |
| 22 | 10500 | 1 | GGGATTACTAACCTGCGTCG (AGG) | 1933 | 95 | 65 |
| 23 | 10501 | 1 | GGATTACTAACCTGCGTCGA (GGG) | 1934 | 98 | 61 |
| 24 | 10501 | -1 | TTATCACGCAGCCCTCGACG (CAG) | 1935 | 96 | 71 |
| 25 | 11027 | 1 | CTAGCAAAACAGATACCAAG (GAG) | 1936 | 59 | 81 |
| 26 | 11046 | 1 | GGAGACACCGCATGTTGTCA (GGG) | 1937 | 83 | 62 |
| 27 | 11105 | -1 | GTGTTTTGAGATCCGTAAGG (CAG) | 1938 | 90 | 71 |
| 28 | 11108 | -1 | AGCGTGTTTTGAGATCCGTA (AGG) | 1939 | 91 | 62 |
| 29 | 11121 | 1 | TTACGGATCTCAAAACACGC (TAG) | 1940 | 92 | 86 |
| 30 | 11466 | -1 | TTCTGATATATGCTACGACC (CGG) | 1941 | 92 | 60 |
| 31 | 12273 | -1 | TGAATCACAGACCTAAACGT (CAG) | 1942 | 79 | 79 |
| 32 | 12530 | -1 | GCAAGGATATTCTTTCCCAT (CAG) | 1943 | 59 | 81 |
| 33 | 12956 | -1 | TAGGGGACTTAACCTCCACA (AGG) | 1944 | 81 | 67 |
| 34 | 12973 | -1 | TGGGAAAAGGTATTGCCTAG (GGG) | 1945 | 70 | 74 |
| 35 | 14409 | -1 | TGGATACACTGAACACACCG (AGG) | 1946 | 85 | 73 |
| 36 | 14896 | -1 | AGTTCTTATATAGCAAACCG (GAG) | 1947 | 88 | 82 |
| 37 | 14921 | 1 | ATAAGAACTGAGCTTTAGAG (AAG) | 1948 | 55 | 84 |
| 38 | 15045 | 1 | GCTGTCTTACTATTTTACTG (CAG) | 1949 | 56 | 83 |
| 39 | 15387 | -1 | GTAATAACTTTGGCACCAGG (CAG) | 1950 | 67 | 91 |
| 40 | 15569 | 1 | ATAAAGTCTTAACTAACAGA (GAG) | 1951 | 52 | 89 |
| 41 | 15850 | -1 | GGAGAACTGCTTGAACCCGG (GAG) | 1952 | 71 | 72 |
| 42 | 17006 | 1 | TAGTTATCATTGGGACACCT (GGG) | 1953 | 82 | 63 |
| 43 | 17865 | 1 | AGTGAGCTGAGATCGCACCA (AGG) | 1954 | 82 | 82 |
| 44 | 18150 | -1 | ATTGGGTCTCCAATACCAAA (CAG) | 1955 | 75 | 75 |
| 45 | 18651 | 1 | GGCCCTGTAGGCGTTACACT (AGG) | 1956 | 92 | 62 |
| 46 | 18855 | 1 | GGTGGGAACAACACACACTG (GGG) | 1957 | 62 | 74 |
| 47 | 19346 | 1 | CCACATGGATGGATACACAA (GGG) | 1958 | 68 | 72 |
| 48 | 20999 | 1 | AGTCAGCTATGATTGCACCA (CAG) | 1959 | 75 | 88 |
| 49 | 21248 | -1 | GCTTGTACGCAAATAACAGG (GAG) | 1960 | 83 | 86 |
| 50 | 23890 | -1 | AGCCCTAAACCCGTAAAATG (GGG) | 1961 | 81 | 63 |
| 51 | 24449 | 1 | GCTCAGCTGAACCAGAGCAA (GAG) | 1962 | 58 | 89 |
| 52 | 24871 | -1 | AATCTGATTTGGCGACACAA (AGG) | 1963 | 83 | 63 |
| 53 | 25247 | -1 | TTGCCCACTGGTGATCACCA (GGG) | 1964 | 69 | 72 |
| 54 | 25468 | -1 | GTATGCATAGGGGTATACTT (TAG) | 1965 | 83 | 78 |
| 55 | 25928 | 1 | TATAGACAAGTCCACGAACC (AGG) | 1966 | 87 | 64 |
| 56 | 25930 | 1 | TAGACAAGTCCACGAACCAG (GAG) | 1967 | 85 | 73 |
| 57 | 26295 | -1 | ATACCTCAGACCGGGCATGG (TGG) | 1968 | 78 | 73 |
| 58 | 26495 | 1 | AATGAAGTGGAAGTACACAG (TAG) | 1969 | 55 | 81 |
| 59 | 26796 | 1 | ATAAGATGGTCACAGCTTGG (GGG) | 1970 | 63 | 74 |
| 60 | 26974 | 1 | TCCTGCCTCAGCCTTCCGAG (GAG) | 1971 | 55 | 84 |
| 61 | 27331 | -1 | GCTTATGGGATTAACCCACA (AGG) | 1972 | 80 | 65 |
| 62 | 27917 | 1 | GGAGCCACAGATTGTTAGCA (GAG) | 1973 | 71 | 75 |
| 63 | 28255 | -1 | ACACGGAAAACAAATCCAGG (AAG) | 1974 | 51 | 87 |
| 64 | 28522 | -1 | TGGGAGATCAACATGCCTAG (TGG) | 1975 | 69 | 73 |
| 65 | 29289 | 1 | GCACCTGCTCCATATTTAGT (AAG) | 1976 | 73 | 75 |
| 66 | 29487 | -1 | CTTGAGCCGTCAAAGACACA (CAG) | 1977 | 67 | 81 |
| 67 | 29862 | -1 | GTATTACCACTTCGTGAAAA (GAG) | 1978 | 85 | 62 |
| 68 | 29864 | 1 | GCTTGTTTACTCTTTTCACG (AAG) | 1979 | 66 | 91 |
| 69 | 29990 | 1 | CCATCTTTGTTGTTTCAAGG (CAG) | 1980 | 58 | 83 |
| 70 | 30043 | 1 | GAATACTCCCAAATTCAGGG (AGG) | 1981 | 67 | 76 |
| 71 | 30500 | 1 | AGAGCATACTGACCTCAACG (TGG) | 1982 | 83 | 77 |
| 72 | 30917 | 1 | TAGATACCCATCTTATACAC (AGG) | 1983 | 82 | 60 |
| 73 | 31112 | 1 | ACACTGCTGCTTCACATCAG (GGG) | 1984 | 61 | 70 |
| 74 | 31620 | -1 | GATACCATTAACTATCACCT (GGG) | 1985 | 73 | 71 |
| 75 | 33443 | 1 | GAGACTCTATTCTAAACGTG (AGG) | 1986 | 85 | 63 |
| 76 | 33616 | 1 | TAACTGCAGTAGTTGACCAT (TGG) | 1987 | 82 | 64 |
| 77 | 34247 | -1 | TTTGCTATGACACAGTACAG (AAG) | 1988 | 66 | 80 |
| 78 | 34544 | 1 | TCTTAGACGGTATAAAGTGG (GAG) | 1989 | 80 | 72 |
| 79 | 35281 | 1 | GAGGGTCACTTGAATCCCAG (AGG) | 1990 | 68 | 74 |
| 80 | 36749 | 1 | TTTTAAATTTGATTTCCGAA (GAG) | 1991 | 56 | 85 |
| 81 | 37237 | -1 | TTCGTGACCTGACAATTGGG (CAG) | 1992 | 83 | 72 |
| 82 | 37670 | 1 | AAGCCCTAAATCAATGCCGA (GGG) | 1993 | 84 | 61 |
| 83 | 37739 | 1 | GGGCATGTCCCTTTCATACA (GAG) | 1994 | 72 | 79 |
| 84 | 37955 | -1 | GCACTCTTCCCAGGATACAA (GAG) | 1995 | 55 | 92 |
| 85 | 38493 | -1 | GGAATATTCCTAGTCCCAAG (AGG) | 1996 | 77 | 72 |
| 86 | 38734 | 1 | CCTCTCATAAGAAATCACTG (GAG) | 1997 | 56 | 86 |
| 87 | 39328 | -1 | TACACTGTAAACGGCCTGAG (AGG) | 1998 | 85 | 66 |
| 88 | 39329 | -1 | TTACACTGTAAACGGCCTGA (GAG) | 1999 | 86 | 70 |
| 89 | 39457 | -1 | CCCCAAAATCGATTAAGCTG (AGG) | 2000 | 84 | 66 |
| 90 | 39551 | -1 | CCTCCCTCATGGGAACATGG (AGG) | 2001 | 62 | 70 |
| 91 | 40096 | -1 | GCACAGTCTGAGCATGTACA (GAG) | 2002 | 66 | 90 |
| 92 | 40431 | 1 | GGTGCTAGAGAACAGCCAAT (CAG) | 2003 | 73 | 92 |
| 93 | 41623 | -1 | CGTCATGTAGAATATGGCAG (AAG) | 2004 | 71 | 83 |
| 94 | 42582 | 1 | AAGACATGTTACATTGTAGG (GGG) | 2005 | 63 | 70 |
| 95 | 42636 | 1 | AGTCAACTCTGCAAAACAAG (GAG) | 2006 | 52 | 83 |
| 96 | 42662 | 1 | TTAATGAAAGCCAATCATCG (AGG) | 2007 | 74 | 74 |
| 97 | 42857 | 1 | ACTCTGGTAACTCCACCTGG (AGG) | 2008 | 66 | 76 |
| 98 | 43791 | -1 | AGCTATAGTAGAATCCTGTG (TGG) | 2009 | 76 | 75 |
| 99 | 43824 | 1 | TGTACATAGACCCAGCACAA (GGG) | 2010 | 71 | 76 |
| 100 | 45140 | 1 | TTAGGAACCAGGCTGCACAG (CAG) | 2011 | 60 | 89 |
| 101 | 45255 | 1 | TATTGTGAACTGCACATACG (AGG) | 2012 | 81 | 65 |
| 102 | 45256 | 1 | ATTGTGAACTGCACATACGA (GGG) | 2013 | 88 | 71 |
| 103 | 45416 | -1 | GATAACACCTGGCAATCCAG (CAG) | 2014 | 73 | 85 |
| 104 | 45427 | -1 | GCTCTCTTAGTGATAACACC (TGG) | 2015 | 81 | 60 |
| 105 | 46134 | 1 | AAACTGTTAACACAAGAGGG (AGG) | 2016 | 65 | 71 |
| 106 | 46321 | 1 | CAACAGACTGTAAGCCCTAG (AGG) | 2017 | 72 | 70 |
| 107 | 46346 | -1 | GGGACACAATACTAACTAGG (TGG) | 2018 | 81 | 72 |
| 108 | 46675 | -1 | GATTTTAAGGTTTACCCCCG (CAG) | 2019 | 87 | 79 |
| 109 | 47862 | -1 | TGACACTCTGGAACATTAGA (GAG) | 2020 | 71 | 73 |
| 110 | 47868 | 1 | TCACTCTCTCTAATGTTCCA (GAG) | 2021 | 59 | 81 |
| 111 | 47960 | -1 | TTAAGAGTATGAAATCCTAC (AAG) | 2022 | 64 | 84 |
| 112 | 48743 | 1 | GGAGGTCGCTTGAGTGCACG (AGG) | 2023 | 88 | 60 |
| 113 | 48893 | -1 | ATATTGCGTTTATACCACAG (AAG) | 2024 | 71 | 74 |
| 114 | 49353 | -1 | TTACCATTGAGAGATCCTTG (GAG) | 2025 | 71 | 72 |
| 115 | 50070 | 1 | AAGGTGATGTTATCGAACAT (AGG) | 2026 | 88 | 63 |
| 116 | 50074 | 1 | TGATGTTATCGAACATAGGA (GAG) | 2027 | 82 | 65 |
| 117 | 50130 | -1 | GACAAGGATACGCTTAACCC (TGG) | 2028 | 92 | 62 |
| 118 | 50147 | 1 | TTAAGCGTATCCTTGTCAGC (CAG) | 2029 | 87 | 69 |
| 119 | 50619 | -1 | GATCCATTAGAAATGCTGAT (CAG) | 2030 | 57 | 88 |
| 120 | 51722 | -1 | GCACTCCAGCCTGAACCAGA (GAG) | 2031 | 67 | 81 |
| 121 | 51778 | -1 | GGAGAATTACTTGAACCCAG (CAG) | 2032 | 54 | 82 |
| 122 | 53493 | -1 | GTTAATAATCATGCTCCGAA (GAG) | 2033 | 87 | 74 |
| 123 | 53495 | -1 | GAGTTAATAATCATGCTCCG (AAG) | 2034 | 82 | 86 |
| 124 | 53560 | 1 | GAGGTTATGTCATCTCCACA (GGG) | 2035 | 66 | 73 |
| 125 | 54056 | 1 | TCTTGCTTATTGCTTGACAA (CAG) | 2036 | 64 | 81 |
| 126 | 54511 | -1 | GAGCCATGATCACACCACTG (CGG) | 2037 | 69 | 84 |
| 127 | 54692 | -1 | AAGGCGGGTGAATCACTTGA (GGG) | 2038 | 81 | 65 |
| 128 | 54693 | -1 | CAAGGCGGGTGAATCACTTG (AGG) | 2039 | 84 | 62 |
| 129 | 55118 | 1 | ACCCTGGTCAATAGCCACAG (TGG) | 2040 | 70 | 72 |
| 130 | 55121 | -1 | AATGCAGGTATACTCCACTG (TGG) | 2041 | 79 | 79 |
| 131 | 55162 | 1 | ATACACTCTTGACAACCATA (GAG) | 2042 | 74 | 78 |
| 132 | 56004 | 1 | CCCCATTCTCAAATTCCAAG (CAG) | 2043 | 57 | 87 |
| 133 | 56439 | -1 | GATGTGTTCTTCAAGTAGCA (GAG) | 2044 | 66 | 86 |
| 134 | 57073 | 1 | GAGACTAATGTCGAACAACA (TGG) | 2045 | 81 | 67 |
| 135 | 57802 | -1 | TTTTAGCTAGAACCAGGGTG (GAG) | 2046 | 71 | 79 |
| 136 | 60122 | 1 | CTGACTAATGAAAACTCCTG (TGG) | 2047 | 62 | 70 |
| 137 | 60257 | -1 | TAGGCTGACAGGGTTACAGA (GGG) | 2048 | 66 | 70 |
| 138 | 60516 | -1 | ATGCTAGTGGTACCATGCAT (GGG) | 2049 | 81 | 61 |
| 139 | 60808 | -1 | GCCTCACTAGACTTTCAGTG (TAG) | 2050 | 76 | 79 |
| 140 | 61932 | -1 | GCACCCCAAAACAATTACCA (CAG) | 2051 | 66 | 85 |
| 141 | 62404 | 1 | TTAAGCCAAAGCCTAATCCA (CAG) | 2052 | 74 | 71 |
| 142 | 62737 | -1 | GCTGCATTATCCCCTAACAA (GAG) | 2053 | 81 | 94 |
| 143 | 63063 | -1 | CTATTTATAGAGCACAGGCA (GAG) | 2054 | 56 | 85 |
| 144 | 63147 | -1 | TGAGCTATAAGTATCAACAC (TGG) | 2055 | 80 | 63 |
| 145 | 63203 | -1 | CCAGGCACATTGTCAATAGG (CAG) | 2056 | 79 | 75 |
| 146 | 63236 | 1 | GTCACTCAAGAGCTCTAACG (GAG) | 2057 | 87 | 68 |
| 147 | 63239 | 1 | ACTCAAGAGCTCTAACGGAG (AGG) | 2058 | 89 | 68 |
| 148 | 63307 | 1 | TCTGTAGCCTATGGGCCAAA (GAG) | 2059 | 71 | 72 |
| 149 | 66208 | 1 | TTAGGATTGACTTGGCGATG (CGG) | 2060 | 84 | 61 |
| 150 | 66433 | 1 | GTTTGTAGTTCTCCTCGAAG (AGG) | 2061 | 84 | 62 |
| 151 | 66811 | -1 | AGGGAGACTTTATAAACCGG (AGG) | 2062 | 85 | 73 |
| 152 | 67111 | -1 | AGTGAGCCAAAATCGCGCCA (CGG) | 2063 | 95 | 69 |
| 153 | 67288 | -1 | AGGTGGGCAGAACACAACGT (CAG) | 2064 | 79 | 74 |
| 154 | 67480 | 1 | AAACTTACAATCATGGTCGA (AGG) | 2065 | 89 | 61 |
| 155 | 67959 | -1 | GGCTTTTTATTTGTATGCGG (CAG) | 2066 | 79 | 72 |
| 156 | 67997 | -1 | CATTTCTCACCGTATTCAGG (AGG) | 2067 | 82 | 62 |
| 157 | 67998 | -1 | GCATTTCTCACCGTATTCAG (GAG) | 2068 | 83 | 65 |
| 158 | 68003 | 1 | ACTTACCTCCTGAATACGGT (GAG) | 2069 | 90 | 67 |
| 159 | 68307 | -1 | GATTCCTCACTTACTAACCA (CGG) | 2070 | 75 | 73 |
| 160 | 68314 | 1 | ATTACCGTGGTTAGTAAGTG (AGG) | 2071 | 88 | 60 |
| 161 | 68419 | -1 | CCTAAGTTGAAGGAACGTCA (GAG) | 2072 | 83 | 63 |
| 162 | 68756 | -1 | CGCATCTATCAATGTCACCT (TGG) | 2073 | 80 | 62 |
| 163 | 69363 | -1 | GGAACAAAAGAGACGACAGT (GGG) | 2074 | 69 | 72 |
| 164 | 69460 | 1 | TATGACCATGAATAACCCAC (CGG) | 2075 | 68 | 71 |
| 165 | 69464 | -1 | CATTTTTGGTCCAGTCCGGT (GGG) | 2076 | 92 | 61 |
| 166 | 69955 | 1 | AGGGTGTGTCCATAACCCAA (CAG) | 2077 | 80 | 69 |
| 167 | 70069 | -1 | GTAAAAGTGTACCTAAACAC (AAG) | 2078 | 73 | 74 |
| 168 | 70165 | 1 | TCACTTTTCTTCGTGACCCG (TGG) | 2079 | 86 | 70 |
| 169 | 70656 | -1 | TTAATCTTAGGCTTAGTAAG (CAG) | 2080 | 69 | 83 |
| 170 | 70888 | 1 | GAGCCACCTAGACAATACAG (AAG) | 2081 | 74 | 74 |
| 171 | 70890 | 1 | GCCACCTAGACAATACAGAA (GGG) | 2082 | 69 | 75 |
| 172 | 71166 | 1 | TCACCACTACCTAATTAGAG (AAG) | 2083 | 80 | 79 |
| 173 | 71983 | 1 | GAGAGTGGGGTTAAACACCA (GGG) | 2084 | 73 | 76 |
| 174 | 72722 | 1 | TGTAGGGGCTTTGATCCAGT (CAG) | 2085 | 79 | 74 |
| 175 | 73080 | -1 | CTGCTAGATAGCTTAGAACC (AGG) | 2086 | 83 | 61 |
| 176 | 73091 | 1 | CCTGGTTCTAAGCTATCTAG (CAG) | 2087 | 82 | 62 |
| 177 | 73609 | 1 | TCATCTGTATGCACTCTCAG (AAG) | 2088 | 64 | 81 |
| 178 | 74688 | -1 | GCTGTCTCAGCCAATCACAG (CAG) | 2089 | 63 | 82 |
| 179 | 75558 | -1 | GCTTAAATGCCATCACCTCA (GAG) | 2090 | 64 | 83 |
| 180 | 76917 | -1 | TCTTTCCTCCTGTTTCGGTG (GAG) | 2091 | 74 | 72 |
| 181 | 77252 | 1 | GCCAGATTATGTGTAGACTG (TGG) | 2092 | 76 | 74 |
| 182 | 77679 | -1 | GTTTTAGCCCAATATAACCA (CAG) | 2093 | 71 | 87 |
| 183 | 77846 | -1 | GCACATGATACTCTACACTC (TGG) | 2094 | 81 | 62 |
| 184 | 77927 | -1 | GAAGAGTATATCCCCAACGA (AGG) | 2095 | 89 | 66 |
| 185 | 78181 | -1 | GGAATGCAGCATAACGGCAA (AGG) | 2096 | 90 | 61 |
| 186 | 78444 | -1 | CCATGTATATTAAATCTACA (GAG) | 2097 | 56 | 80 |
| 187 | 79522 | -1 | AACACTCCTGAACCTCGGGA (AGG) | 2098 | 85 | 61 |
| 188 | 80328 | 1 | TACTGAGTCTGCCTCTTCCG (GAG) | 2099 | 75 | 74 |
| 189 | 80331 | -1 | TATGTGGTACAATACTCCGG (AAG) | 2100 | 96 | 74 |
| 190 | 80539 | 1 | TAGGCTATACCACATAGCCT (AGG) | 2101 | 81 | 63 |
| 191 | 80545 | -1 | GTATAGGCTACCATACACCT (AGG) | 2102 | 88 | 69 |
| 192 | 80585 | 1 | GGTTTGTATAAGTGCACCCT (AGG) | 2103 | 82 | 60 |
| 193 | 80970 | -1 | GAAAATAAATTAAGGCAACG (TGG) | 2104 | 66 | 72 |
| 194 | 81615 | 1 | GTGCTCGAATTAACACAAGA (CAG) | 2105 | 83 | 66 |
| 195 | 81715 | 1 | TCTTCTTTCTGGAAAACGAA (GAG) | 2106 | 51 | 88 |
| 196 | 82630 | 1 | CGTGTGTAGTCAGTGTCCAG (AGG) | 2107 | 74 | 70 |
| 197 | 82993 | -1 | TGATATACTCAGGAAGGCGA (GAG) | 2108 | 74 | 72 |
| 198 | 83017 | -1 | GTACTTAACTAGGACCCCAT (GGG) | 2109 | 87 | 69 |
| 199 | 84026 | -1 | CCAAACCATGAAAACCCTAG (AAG) | 2110 | 71 | 74 |
| 200 | 84279 | -1 | GCATGGTAGTGGTACCCAAA (CAG) | 2111 | 81 | 79 |
| 201 | 85965 | 1 | GACAACTACCTAATGCATGC (AGG) | 2112 | 84 | 61 |
| 202 | 86012 | 1 | ATAGGTGGAGCAAACCACCA (TAG) | 2113 | 72 | 75 |
| 203 | 86606 | 1 | GGTGGGCAATGAGAACACAT (GGG) | 2114 | 61 | 74 |
| 204 | 86633 | 1 | GAGAAGATCATCACACACTG (GGG) | 2115 | 65 | 74 |
| 205 | 86724 | 1 | ATGGGTGCAGCAAACCACCA (TGG) | 2116 | 64 | 73 |
| 206 | 86730 | -1 | ACATGGGTAGACACGTGCCA (TGG) | 2117 | 83 | 75 |
| 207 | 87379 | -1 | TACGACAAAGAAGATCATGT (AGG) | 2118 | 67 | 72 |
| 208 | 87621 | 1 | CGGTTACAACAGAGGCTCTG (CGG) | 2119 | 63 | 71 |
| 209 | 87627 | -1 | AGAAGGCCAAGCATATACCG (CAG) | 2120 | 85 | 94 |
| 210 | 88070 | 1 | ACACACAATGGATTTCCCCA (GAG) | 2121 | 58 | 88 |
| 211 | 88144 | -1 | ACTGTTTTAGTCATACCCCA (TAG) | 2122 | 71 | 89 |
| 212 | 88422 | 1 | GGAGTCTAATGTATTAGGGG (AGG) | 2123 | 83 | 64 |
| 213 | 88874 | 1 | ACTACCTAGGGAATTCCCAG (AAG) | 2124 | 68 | 83 |
| 214 | 89604 | -1 | TATGCCCTTCGACACCAAGG (TGG) | 2125 | 78 | 72 |
| 215 | 89611 | 1 | GTTTCCACCTTGGTGTCGAA (GGG) | 2126 | 86 | 64 |
| 216 | 89689 | 1 | TGCTAAATGTGTATCACCCG (AGG) | 2127 | 88 | 68 |
| 217 | 89738 | 1 | TTTAGGGTAAGAGAACTCGG (GAG) | 2128 | 83 | 74 |
| 218 | 90216 | -1 | TTATAAGCAGGGAGGCCTGA (GAG) | 2129 | 54 | 81 |
| 219 | 90645 | -1 | GAAGTTGCCCAATACCAAAG (AGG) | 2130 | 70 | 72 |
| 220 | 90646 | -1 | AGAAGTTGCCCAATACCAAA (GAG) | 2131 | 64 | 82 |
| 221 | 91214 | 1 | TTTTCTGCAAGGCGAAGCAG (CAG) | 2132 | 72 | 76 |
| 222 | 91444 | 1 | TGCTGTGGACTGCAACGGTG (TGG) | 2133 | 82 | 68 |
| 223 | 91457 | -1 | CTGAGCGTCCATCAACCAGG (GAG) | 2134 | 81 | 69 |
| 224 | 92139 | 1 | GTAGCTCCTAAGTTGAAACG (GAG) | 2135 | 90 | 85 |
| 225 | 92140 | 1 | TAGCTCCTAAGTTGAAACGG (AGG) | 2136 | 87 | 72 |
| 226 | 92408 | 1 | AAGGTCTACGAGTCACTAAG (TGG) | 2137 | 88 | 64 |
| 227 | 93703 | 1 | GTAAGAGACAACCATTACAG (GAG) | 2138 | 67 | 81 |
| 228 | 94028 | -1 | ACTGGCTGTATATCATAGGA (GAG) | 2139 | 79 | 74 |
| 229 | 94038 | 1 | GCTCTCCTATGATATACAGC (CAG) | 2140 | 83 | 68 |
| 230 | 94204 | 1 | GCACGACCAATCAAATACAC (AAG) | 2141 | 87 | 70 |
| 231 | 95047 | 1 | TGTCATGGGACTAAAAACAC (AGG) | 2142 | 60 | 71 |
| 232 | 95431 | -1 | GCAAATCTGTACCACCAAGG (TGG) | 2143 | 73 | 73 |
| 233 | 95434 | -1 | TGTGCAAATCTGTACCACCA (AGG) | 2144 | 72 | 77 |
| 234 | 95600 | 1 | GGAACACCACCCAATGACTG (AGG) | 2145 | 74 | 74 |
| 235 | 95871 | 1 | ATAAAAGGTTACCATCTTGG (GAG) | 2146 | 61 | 82 |
| 236 | 96250 | -1 | CTATATGCCAGGCTAATAAG (CAG) | 2147 | 71 | 81 |
| 237 | 96762 | -1 | TGCTAACTCAGCGAGCACAT (GGG) | 2148 | 82 | 61 |
| 238 | 97850 | 1 | AGTTCTGCGATCATTCAGAC (TGG) | 2149 | 81 | 60 |
| 239 | 98726 | -1 | GGTTACCTAGAGCCCCTACT (GAG) | 2150 | 83 | 66 |
| 240 | 98747 | -1 | TGATGGCCAACACTAAGGTG (AGG) | 2151 | 69 | 73 |
| 241 | 99300 | -1 | TTACTAGTATAGCTTCAAGA (GAG) | 2152 | 64 | 88 |
| 242 | 99408 | -1 | ATAGAGGCTAGTCTTACACA (TGG) | 2153 | 72 | 72 |
| 243 | 99426 | 1 | TAAGACTAGCCTCTATAGCA (AGG) | 2154 | 80 | 63 |
| 244 | 99753 | -1 | CACGCGATGCTATAGGCCAG (TGG) | 2155 | 87 | 63 |
| 245 | 99765 | 1 | CACTGGCCTATAGCATCGCG (TGG) | 2156 | 97 | 66 |
| 246 | 99940 | -1 | ACTGTGACAAGTCAACGTGG (CAG) | 2157 | 81 | 77 |
| 247 | 99943 | -1 | CCAACTGTGACAAGTCAACG (TGG) | 2158 | 86 | 75 |
| 248 | 101373 | -1 | GTAGTTCCTCCATTAGTCAA (GAG) | 2159 | 74 | 92 |
| 249 | 101609 | 1 | TCTATATCAGGAAACTTGCG (AAG) | 2160 | 82 | 65 |
| 250 | 102970 | -1 | ACACGGATAAGACCACATGA (GAG) | 2161 | 72 | 74 |
| 251 | 103743 | -1 | TTACCAGATGAATCTTCAGG (AAG) | 2162 | 60 | 88 |
| 252 | 104091 | 1 | TGATGTATCCATGATCCGCA (AAG) | 2163 | 92 | 85 |
| 253 | 105545 | -1 | TACTCGCCCATAGATATCGA (GGG) | 2164 | 96 | 70 |
| 254 | 105546 | -1 | CTACTCGCCCATAGATATCG (AGG) | 2165 | 97 | 62 |
| 255 | 108599 | 1 | CTCAACTGGAAATCGTCCCA (GGG) | 2166 | 85 | 64 |
| 256 | 108829 | 1 | AGCTAACATGATACTAACCA (GGG) | 2167 | 76 | 79 |
| 257 | 109542 | 1 | ATAAAGCTATAGTAACCAAA (CAG) | 2168 | 58 | 93 |
| 258 | 110187 | 1 | CTCAACATCACTAATCACCA (GGG) | 2169 | 69 | 72 |
| 259 | 110646 | 1 | GGCAACATGAATGAACCTGG (AGG) | 2170 | 65 | 78 |
| 260 | 110720 | -1 | CTACTTCTATGACAACCCTT (TAG) | 2171 | 71 | 72 |
| 261 | 110756 | 1 | AGTAGAATAGTGGTTATCGG (AGG) | 2172 | 87 | 66 |
| 262 | 110856 | -1 | CTAGTCATCCAACGATTCAA (TAG) | 2173 | 91 | 73 |
| 263 | 112186 | 1 | TCTCTGGCCCGGTACTCACG (TAG) | 2174 | 92 | 61 |
| 264 | 112189 | -1 | ACACAGGGAGAAAACTACGT (GAG) | 2175 | 72 | 71 |
| 265 | 112238 | -1 | GTCCAAATCCAATATAACTG (GGG) | 2176 | 68 | 74 |
| 266 | 112970 | 1 | TGCCACGATAAGGCCCAAAG (AGG) | 2177 | 80 | 68 |
| 267 | 113933 | -1 | AATTTCATCAACAAGCCAGG (GAG) | 2178 | 56 | 83 |
| 268 | 114417 | 1 | CCACAGATCAGCAGTCCACG (TGG) | 2179 | 77 | 73 |
| 269 | 114563 | 1 | GTAGAGAAAGAAATAGAACG (AAG) | 2180 | 51 | 94 |
| 270 | 114615 | 1 | GGAAGGGCAAAACTTTCCCA (GAG) | 2181 | 52 | 86 |
| 271 | 119671 | 1 | AAGATTGTAGAGACCTCAAG (GGG) | 2182 | 60 | 76 |
| 272 | 124929 | -1 | ACAGATGGTGATGACCAATG (GGG) | 2183 | 72 | 77 |
| 273 | 126886 | 1 | GGGGCCGTGCAAATATATGG (AGG) | 2184 | 90 | 63 |
| 274 | 126887 | 1 | GGGCCGTGCAAATATATGGA (GGG) | 2185 | 82 | 63 |
| 275 | 127078 | -1 | CCTCAAGTGATCGCCCACCT (CGG) | 2186 | 87 | 60 |
| 276 | 127540 | 1 | GGGAGCTTAGACTAGTATGG (TAG) | 2187 | 89 | 68 |
| 277 | 131325 | 1 | AGAGTTGCACAGTAGCCCAA (TAG) | 2188 | 70 | 82 |
| 278 | 131352 | -1 | TCTGGATTATTCTCTCTGGA (CAG) | 2189 | 55 | 83 |
| 279 | 131411 | 1 | AGAGATGCACAATAGCCCGA (CAG) | 2190 | 86 | 91 |
| 280 | 131432 | -1 | CTATTCCGTTTGAATAGCAG (AAG) | 2191 | 72 | 85 |
| 281 | 131938 | -1 | AGGATCCCAGGACTACCAGG (TGG) | 2192 | 68 | 74 |
| 282 | 132160 | -1 | GATGTCTCCACGGTACATGG (AGG) | 2193 | 84 | 72 |
| 283 | 132164 | 1 | AACTTATCCTCCATGTACCG (TGG) | 2194 | 85 | 66 |
| 284 | 132166 | 1 | CTTATCCTCCATGTACCGTG (GAG) | 2195 | 88 | 68 |
| 285 | 132402 | -1 | AGTTTGGGTGGAATTCCAGG (CAG) | 2196 | 51 | 91 |
| 286 | 132545 | -1 | ACTAAAGTGACAGATAGTCA (GGG) | 2197 | 64 | 70 |
| 287 | 135192 | 1 | TCACTGCAAACACAACCCTG (AGG) | 2198 | 65 | 77 |
| 288 | 135662 | -1 | TAGGTAAACACGTGTCATGG (GGG) | 2199 | 77 | 71 |
| 289 | 135663 | -1 | ATAGGTAAACACGTGTCATG (GGG) | 2200 | 83 | 64 |
| 290 | 138647 | 1 | GTTTACATATTATTTTAACG (AAG) | 2201 | 54 | 90 |
| 291 | 140378 | 1 | GGTCTCAAAACTGAAAACGT (TGG) | 2202 | 68 | 71 |
| 292 | 140459 | -1 | ATTTGCCACATCCAACCCCA (GAG) | 2203 | 51 | 87 |
| 293 | 140907 | 1 | TTAAAGTTCTGGAAGCTGGG (AAG) | 2204 | 52 | 86 |
| 294 | 141052 | -1 | GAGTGAGTTAGATATCACAA (GAG) | 2205 | 71 | 75 |
| 295 | 144206 | 1 | AAAAAGACGGACGGATCATG (AGG) | 2206 | 85 | 62 |
| 296 | 144318 | 1 | TGTAGTCTCAGCTACTAGGG (AGG) | 2207 | 60 | 74 |
| 297 | 145243 | 1 | GTACAGTGGTACATAGACCC (CGG) | 2208 | 90 | 72 |
| 298 | 145249 | -1 | TACTCACTCTTTGGGGACCG (GGG) | 2209 | 84 | 64 |
| 299 | 145337 | 1 | CAGTAGGGAGTGGCTATCCG (GGG) | 2210 | 87 | 66 |
| 300 | 145363 | 1 | TCTGGGAAGACATCACAAGG (AGG) | 2211 | 60 | 76 |
| 301 | 145431 | 1 | AGGCAGATAGGCATTCAAGG (CAG) | 2212 | 56 | 85 |
| 302 | 145518 | -1 | CCCTACTATGTTTATCACGT (AGG) | 2213 | 92 | 65 |
| 303 | 145524 | 1 | GAGTGCCTACGTGATAAACA (TAG) | 2214 | 84 | 75 |
| 304 | 145883 | 1 | AGAGTTGAATAGTTGCAACG (GAG) | 2215 | 80 | 64 |
| 305 | 148450 | -1 | ACCACTAGGCTACTATCAGG (TGG) | 2216 | 88 | 63 |
| 306 | 148460 | 1 | TCCACCTGATAGTAGCCTAG (TGG) | 2217 | 88 | 74 |
| 307 | 148475 | 1 | CCTAGTGGTTGTGAGTACAG (CAG) | 2218 | 76 | 81 |
| 308 | 149832 | -1 | TCAGGAACCATATCTTACGT (TGG) | 2219 | 87 | 66 |
| 309 | 150045 | -1 | TCTAACCTCCAAAAGTGTGA (GAG) | 2220 | 67 | 82 |
| 310 | 150239 | -1 | ACTGGCATCCTTACTAGTAG (AGG) | 2221 | 84 | 61 |
| 311 | 152488 | 1 | CCATTTTAGTTACTTCACCG (AAG) | 2222 | 83 | 86 |
| 312 | 153443 | -1 | GGAGAATCACTTGAACCAGG (GAG) | 2223 | 54 | 88 |
| 313 | 154133 | -1 | GGGGTGCCAAGAATACACAA (TAG) | 2224 | 75 | 76 |
| 314 | 154336 | 1 | TTATAATCCCAGCAACTCGG (GAG) | 2225 | 80 | 68 |
| 315 | 154500 | 1 | GGAGGATCACTGAAGCCCAA (GAG) | 2226 | 59 | 83 |
| 316 | 154992 | 1 | ATTGTTAGTGTATAGAAACG (CAG) | 2227 | 76 | 76 |
| 317 | 155184 | -1 | ACAGCACTAGAAGTCCTAGC (CAG) | 2228 | 81 | 68 |
| 318 | 155293 | 1 | ATTGAATACGATGTTAGCTG (TGG) | 2229 | 80 | 60 |
| 319 | 155374 | 1 | GCTACTATAACAGAATACCA (CAG) | 2230 | 66 | 91 |
| 320 | 155448 | 1 | ATGGAAAGTTCATGACTGAG (GGG) | 2231 | 62 | 70 |
| 321 | 155658 | -1 | GCAATTGTGACAGAATTGGG (AGG) | 2232 | 63 | 74 |
| 322 | 155913 | -1 | CATGTACTACGACCAAGTGG (GAG) | 2233 | 84 | 81 |
| 323 | 155915 | -1 | ATCATGTACTACGACCAAGT (GGG) | 2234 | 92 | 69 |
| 324 | 155916 | -1 | GATCATGTACTACGACCAAG (TGG) | 2235 | 92 | 63 |
| 325 | 155918 | 1 | GGACAACTCCCACTTGGTCG (TAG) | 2236 | 88 | 62 |
| 326 | 156439 | -1 | AAGGGTAACAACACACACTG (GGG) | 2237 | 67 | 74 |
| 327 | 157217 | -1 | CTATCAACAGAGTAAGCAGA (CAG) | 2238 | 54 | 81 |
| 328 | 157656 | -1 | ATGGGTGCCGCACACCAACA (TGG) | 2239 | 82 | 65 |
| 329 | 159943 | 1 | GCATCCCTCAGATAAATCCC (AAG) | 2240 | 71 | 82 |
| 330 | 160831 | -1 | TTGAACAACTCATAATTACG (TGG) | 2241 | 83 | 70 |
| 331 | 161670 | 1 | GTAGCCTAATGGTTTCCATG (GGG) | 2242 | 68 | 77 |
| 332 | 161744 | -1 | CAAGTACAAAAAACGATGGG (GGG) | 2243 | 85 | 66 |
| 333 | 162012 | 1 | ATAGTTTCTCAACCCTTGGG (AAG) | 2244 | 70 | 77 |
| 334 | 162135 | -1 | GAAAAACTCATGCACACCAG (AGG) | 2245 | 63 | 71 |
| 335 | 163457 | -1 | TGCAGCAACACCATAACAGT (AGG) | 2246 | 78 | 70 |
| 336 | 163882 | -1 | GTAACCAAAAGAGAGCAATG (GGG) | 2247 | 53 | 82 |
| 337 | 164242 | -1 | ATTGCCTCATGATAACCACA (AGG) | 2248 | 64 | 72 |
| 338 | 164558 | -1 | CATGGTAAAGAGCAACACAA (GAG) | 2249 | 53 | 83 |
| 339 | 164789 | 1 | GCTCTTTTAAAGTTTCCACT (GAG) | 2250 | 55 | 84 |
| 340 | 166597 | -1 | TGAAGTTTAGCAAAGTACCA (GAG) | 2251 | 61 | 80 |
| 341 | 166686 | -1 | AAAGGGATAAAAGAAATCCG (CAG) | 2252 | 56 | 83 |
| 342 | 168072 | -1 | GCATGCCAAGAACTTGACAG (AAG) | 2253 | 62 | 95 |
| 343 | 169562 | 1 | CTTATGAGTGAGAACATGCA (GAG) | 2254 | 57 | 80 |
| 344 | 170590 | -1 | CCTCACAAAAACAAGCAACG (GGG) | 2255 | 72 | 73 |
| 345 | 175111 | -1 | TCAAGTGATTTCGCCCACCT (CGG) | 2256 | 85 | 64 |
| 346 | 180157 | -1 | GTAGGAACACTTGAAGCCAG (GAG) | 2257 | 61 | 84 |

*Searching was based on WT Cas9 PAMs, 347 solutions out of ~34,500 possible guide-RNA sequences are shown.

TABLE 11
Top-Scoring Guide-RNA Target Sites and PAM Sequences in SCN9A for
Programmed Cas9-Nickase Pairs

| | | | | SEQ | | |
|---|---|---|---|---|---|---|
| | | | | ID | Specificity | Efficiency |
| Pair | Position | Strand | Guide-RNA target site (PAM) | NOs | score⁵⁰ | score²⁸ |
| 1 | 6112 | 1 | CAGGAGTTCTAGATCAGCCT(GGG) | 2258 | 66 | 60 |
| | 6050 | −1 | CCAAAGTGATGGGATTGCAG(GGG) | 2259 | 62 | 70 |
| 2 | 14921 | 1 | ATAAGAACTGAGCTTTAGAG(AAG) | 2260 | 55 | 84 |
| | 14896 | −1 | AGTTCTTATATAGCAAACCG(GAG) | 2261 | 88 | 82 |
| 3 | 24369 | 1 | AAGACTGATGAATCCAGCCA(GGG) | 2262 | 61 | 68 |
| | 24306 | −1 | ATCCAAGTCATTAGTCTTGG(GGG) | 2263 | 74 | 64 |
| 4 | 26796 | 1 | ATAAGATGGTCACAGCTTGG(GGG) | 2264 | 63 | 74 |
| | 26751 | −1 | CTCCCATATTTAGCCCAATG(GGG) | 2265 | 76 | 68 |
| 5 | 26974 | 1 | TCCTGCCTCAGCCTTCCGAG(GAG) | 2266 | 55 | 84 |
| | 26943 | −1 | GGAGAATCGCTTGAACCCAG(GAG) | 2267 | 59 | 75 |
| 6 | 27276 | 1 | TTGAGTCCTAGATAGGTGGG(TGG) | 2268 | 71 | 61 |
| | 27249 | −1 | GACTCAAGATCCTAGATAGG(TGG) | 2269 | 79 | 61 |
| 7 | 27277 | 1 | TGAGTCCTAGATAGGTGGGT(GGG) | 2270 | 74 | 64 |
| | 27249 | −1 | GACTCAAGATCCTAGATAGG(TGG) | 2271 | 79 | 61 |
| 8 | 27313 | 1 | AAATTGGGCTGGGACCACTT(AGG) | 2272 | 78 | 60 |
| | 27249 | −1 | GACTCAAGATCCTAGATAGG(TGG) | 2273 | 79 | 61 |
| 9 | 28567 | 1 | TGCATGAAAACCTATCCCCT(GGG) | 2274 | 77 | 66 |
| | 28522 | −1 | TGGGAGATCAACATGCCTAG(TGG) | 2275 | 69 | 73 |
| 10 | 29897 | 1 | AATTACCTCCCACAGCAGCA(CAG) | 2276 | 50 | 76 |
| | 29862 | −1 | GTATTACCACTTCGTGAAAA(GAG) | 2277 | 85 | 62 |
| 11 | 29916 | 1 | ACAGGTTACTCAAAAGCCCA(GAG) | 2278 | 60 | 62 |
| | 29862 | −1 | GTATTACCACTTCGTGAAAA(GAG) | 2279 | 85 | 62 |
| 12 | 29919 | 1 | GGTTACTCAAAAGCCCAGAG(GAG) | 2280 | 58 | 73 |
| | 29862 | −1 | GTATTACCACTTCGTGAAAA(GAG) | 2281 | 85 | 62 |
| 13 | 30917 | 1 | TAGATACCCATCTTATACAC(AGG) | 2282 | 82 | 60 |
| | 30869 | −1 | GTCTTTAACTATCATCCATG(TGG) | 2283 | 67 | 67 |
| 14 | 30917 | 1 | TAGATACCCATCTTATACAC(AGG) | 2284 | 82 | 60 |
| | 30864 | −1 | TAACTATCATCCATGTGGAA(GGG) | 2285 | 62 | 60 |
| 15 | 31268 | 1 | TTTGCACAAAGGATTGTAGG(TGG) | 2286 | 63 | 64 |
| | 31215 | −1 | CAAGATACCAAACTAAGAGG(TGG) | 2287 | 62 | 63 |
| 16 | 32326 | 1 | TAGCTGAGATCCACTCCCCT(CGG) | 2288 | 72 | 69 |
| | 32274 | −1 | GATGTTTGCTTGAGCCCCTG(GGG) | 2289 | 66 | 65 |
| 17 | 32400 | 1 | CTTTTTCAATGAGGAAACCG(TGG) | 2290 | 64 | 62 |
| | 32338 | −1 | TATAATCCCAGCACTTTGGG(AGG) | 2291 | 8 | 64 |
| 18 | 36029 | 1 | AATAGGAGACATAGTTCCTG(AGG) | 2292 | 61 | 68 |
| | 35994 | −1 | CACTGGTGAGGAAGTTACAC(GGG) | 2293 | 79 | 63 |
| 19 | 36029 | 1 | AATAGGAGACATAGTTCCTG(AGG) | 2294 | 61 | 68 |
| | 35976 | −1 | ACGGGTAGTCTGTTAGAAAG(AGG) | 2295 | 67 | 60 |
| 20 | 39372 | 1 | TTAGAGCCAAAGGAGCAAGT(AAG) | 2296 | 58 | 62 |
| | 39329 | −1 | TTACACTGTAAACGGCCTGA(GAG) | 2297 | 86 | 70 |
| 21 | 39469 | 1 | CTCAGCTTAATCGATTTTGG(GGG) | 2298 | 77 | 60 |
| | 39418 | −1 | TAGACCACAATTTCACCTGG(AGG) | 2299 | 66 | 64 |
| 22 | 39847 | 1 | TAAGGGAACACCAAAAGCAC(AGG) | 2300 | 62 | 61 |
| | 39815 | −1 | TAGCCAAACCTGCTAGAAAG(AGG) | 2301 | 61 | 64 |
| 23 | 40326 | 1 | CTATGCTTCTGAAAGTTAGC(AAG) | 2302 | 58 | 61 |
| | 40298 | −1 | GCATAGTTACTGGAGTGAGG(CAG) | 2303 | 61 | 75 |
| 24 | 40326 | 1 | CTATGCTTCTGAAAGTTAGC(AAG) | 2304 | 58 | 61 |
| | 40298 | −1 | GCATAGTTACTGGAGTGAGG(CAG) | 2305 | 61 | 75 |
| 25 | 43824 | 1 | TGTACATAGACCCAGCACAA(GGG) | 2306 | 71 | 76 |
| | 43791 | −1 | AGCTATAGTAGAATCCTGTG(TGG) | 2307 | 76 | 75 |
| 26 | 44028 | 1 | TCCATCACCACTACACACAA(TGG) | 2308 | 60 | 60 |
| | 43991 | −1 | CAGAGCCTTGACACCTGCCG(TGG) | 2309 | 70 | 68 |
| 27 | 45061 | 1 | GATCTGTTTATAGGCCACAG(TGG) | 2310 | 61 | 66 |
| | 45014 | −1 | TCTGTGGCTTATACAACTGG(GGG) | 2311 | 75 | 70 |
| 28 | 45061 | 1 | GATCTGTTTATAGGCCACAG(TGG) | 2312 | 61 | 66 |
| | 45015 | −1 | ATCTGTGGCTTATACAACTG(GGG) | 2313 | 65 | 64 |
| 29 | 45113 | 1 | CAGTGACAGATACTGGTCCA(TGG) | 2314 | 66 | 60 |
| | 45064 | −1 | ACCCCTGATCTAACCCACTG(TGG) | 2315 | 73 | 68 |
| 30 | 45255 | 1 | TATTGTGAACTGCACATACG(AGG) | 2316 | 81 | 65 |
| | 45194 | −1 | GCCAAGGCTGATCTAACAGG(AGG) | 2317 | 75 | 69 |
| 31 | 45255 | 1 | TATTGTGAACTGCACATACG(AGG) | 2318 | 81 | 65 |
| | 45210 | −1 | TCTCTGAGAGTCTAATGCCA(AGG) | 2319 | 62 | 64 |
| 32 | 45256 | 1 | ATTGTGAACTGCACATACGA(GGG) | 2320 | 88 | 71 |
| | 45194 | −1 | GCCAAGGCTGATCTAACAGG(AGG) | 2321 | 75 | 69 |
| 33 | 45256 | 1 | ATTGTGAACTGCACATACGA(GGG) | 2322 | 88 | 71 |
| | 45210 | −1 | TCTCTGAGAGTCTAATGCCA(AGG) | 2323 | 62 | 64 |
| 34 | 50918 | 1 | AATGGTGCAGATAGTAAGGA(CAG) | 2324 | 65 | 60 |
| | 50879 | −1 | ATAAATCTATTCCAAGACAA(AAG) | 2325 | 51 | 73 |
| 35 | 53558 | 1 | GAGAGGTTATGTCATCTCCA(CAG) | 2326 | 64 | 69 |
| | 53495 | −1 | GAGTTAATAATCATGCTCCG(AAG) | 2327 | 82 | 86 |
| 36 | 57832 | 1 | AAAATGGACATGGATACCCT(AGG) | 2328 | 70 | 65 |
| | 57804 | −1 | CATTTTAGCTAGAACCAGGG(TGG) | 2329 | 71 | 68 |
| 37 | 57832 | 1 | AAAATGGACATGGATACCCT(AGG) | 2330 | 70 | 65 |
| | 57807 | −1 | GTCCATTTTAGCTAGAACCA(GGG) | 2331 | 71 | 65 |
| 38 | 63236 | 1 | GTCACTCAAGAGCTCTAACG(GAG) | 2332 | 87 | 68 |
| | 63203 | −1 | CCAGGCACATTGTCAATAGG(CAG) | 2333 | 79 | 75 |
| 39 | 63246 | 1 | AGCTCTAACGGAGAGGTACA(AGG) | 2334 | 78 | 62 |
| | 63221 | −1 | GTTAGAGCTCTTGAGTGACC(AGG) | 2335 | 75 | 61 |
| 40 | 63247 | 1 | GCTCTAACGGAGAGGTACAA(GGG) | 2336 | 78 | 64 |
| | 63221 | −1 | GTTAGAGCTCTTGAGTGACC(AGG) | 2337 | 75 | 61 |
| 41 | 66136 | 1 | TTTGGGTTACTGTAGCCTTG(TAG) | 2338 | 67 | 68 |
| | 66100 | −1 | GCATGGTACTGGTACCAAAA(CAG) | 2339 | 74 | 63 |
| 42 | 68003 | 1 | ACTTACCTCCTGAATACGGT(GAG) | 2340 | 90 | 67 |
| | 67959 | −1 | GGCTTTTTATTTGTATGCGG(CAG) | 2341 | 79 | 72 |
| 43 | 70978 | 1 | TTTTGAGGTCACATATGATG(GGG) | 2342 | 63 | 66 |
| | 70933 | −1 | GATGGAAAAGAGGTTAGGCA(GGG) | 2343 | 64 | 67 |
| 44 | 76923 | 1 | GACAGCTCCACCGAAACAGG(AGG) | 2344 | 76 | 65 |
| | 76882 | −1 | TTTACTCTTTCACTTTCACG(AGG) | 2345 | 61 | 62 |
| 45 | 79521 | 1 | TACCAGGCCCATCCTTCCCG(AGG) | 2346 | 68 | 64 |
| | 79497 | −1 | GGGCCTGGTAGAGTGAGTAT(GGG) | 2347 | 77 | 68 |
| 46 | 80585 | 1 | GGTTTGTATAAGTGCACCCT(AGG) | 2348 | 82 | 60 |
| | 80545 | −1 | GTATAGGCTACCATACACCT(AGG) | 2349 | 88 | 69 |
| 47 | 80599 | 1 | CACCCTAGGATGTTTGCACA(AGG) | 2350 | 73 | 60 |
| | 80545 | −1 | GTATAGGCTACCATACACCT(AGG) | 2351 | 88 | 69 |
| 48 | 89635 | 1 | ATAGGCGAGCACATGAAAAG(AGG) | 2352 | 73 | 70 |
| | 89604 | −1 | TATGCCCTTCGACACCAAGG(TGG) | 2353 | 78 | 72 |
| 49 | 89689 | 1 | TGCTAAATGTGTATCACCCG(AGG) | 2354 | 88 | 68 |
| | 89654 | −1 | TTTGGGTGGTACCTGATTGG(GGG) | 2355 | 77 | 66 |
| 50 | 89689 | 1 | TGCTAAATGTGTATCACCCG(AGG) | 2356 | 88 | 68 |
| | 89655 | −1 | ATTTGGGTGGTACCTGATTG(GGG) | 2357 | 76 | 60 |
| 51 | 90246 | 1 | ATAATTCTGCACAAATCCCC(AAG) | 2358 | 64 | 66 |
| | 90216 | −1 | TTATAAGCAGGGAGGCCTGA(GAG) | 2359 | 54 | 81 |
| 52 | 91383 | 1 | GTAACATCAGCCAAGCCAGT(AGG) | 2360 | 63 | 69 |
| | 91353 | −1 | TTACTGCTGCGTCGCTCCTG(GGG) | 2361 | 76 | 69 |
| 53 | 91402 | 1 | TAGGTCCCCACCAATGCTGC(CGG) | 2362 | 75 | 65 |
| | 91353 | −1 | TTACTGCTGCGTCGCTCCTG(GGG) | 2363 | 76 | 69 |
| 54 | 91444 | 1 | TGCTGTGGACTGCAACGGTG(TGG) | 2364 | 82 | 68 |
| | 91396 | −1 | GTTCACCGGCAGCATTGGTG(GGG) | 2365 | 78 | 62 |
| 55 | 91444 | 1 | TGCTGTGGACTGCAACGGTG(TGG) | 2366 | 82 | 68 |
| | 91382 | −1 | TTGGTGGGGACCTACTGGCT(TGG) | 2367 | 75 | 62 |
| 56 | 92524 | 1 | TGCATTACCAATATCAGCAA(GGG) | 2368 | 63 | 64 |
| | 92494 | −1 | TGCAGCATAGCATAGTGAGT(GGG) | 2369 | 73 | 65 |
| 57 | 92524 | 1 | TGCATTACCAATATCAGCAA(GGG) | 2370 | 63 | 64 |
| | 92495 | −1 | ATGCAGCATAGCATAGTGAG(TGG) | 2371 | 68 | 66 |
| 58 | 93703 | 1 | GTAAGAGACAACCATTACAG(GAG) | 2372 | 67 | 81 |
| | 93663 | −1 | GGAAGACCTCATGAACTGAG(CAG) | 2373 | 61 | 70 |
| 59 | 94847 | 1 | CCCCCACATTCCCATTGTGG(GGG) | 2374 | 66 | 64 |
| | 94784 | −1 | GACCTGGGGCATATTGTCAG(GGG) | 2375 | 77 | 69 |
| 60 | 94847 | 1 | CCCCCACATTCCCATTGTGG(GGG) | 2376 | 66 | 64 |
| | 94816 | −1 | GGGGTGAAGTGTTAGACCCA(GGG) | 2377 | 73 | 67 |
| 61 | 94847 | 1 | CCCCCACATTCCCATTGTGG(GGG) | 2378 | 66 | 64 |
| | 94806 | −1 | GTTAGACCCAGGGACCAGGT(GGG) | 2379 | 62 | 69 |
| 62 | 99426 | 1 | TAAGACTAGCCTCTATAGCA(AGG) | 2380 | 80 | 63 |
| | 99395 | −1 | TTACACATGGCTATAAGGTG(CGG) | 2381 | 76 | 62 |
| 63 | 99993 | 1 | TCTCTCATCAGGTATCCAGA(AGG) | 2382 | 70 | 69 |
| | 99943 | −1 | CCAACTGTGACAAGTCAACG(TGG) | 2383 | 86 | 75 |
| 64 | 111569 | 1 | GTTATCTCAAAGGTACCCAT(GAG) | 2384 | 74 | 71 |
| | 111513 | −1 | CACTGACTATCTCTTCAGAG(AAG) | 2385 | 59 | 67 |
| 65 | 112933 | 1 | GGAGAAGGGTATAACCTTGG(GGG) | 2386 | 72 | 66 |
| | 112878 | −1 | CCTGCATCCAATGAATGGTG(TGG) | 2387 | 70 | 68 |
| 66 | 131392 | 1 | AGACCACCGTCCAGAAAGAA(GAG) | 2388 | 55 | 69 |
| | 131349 | −1 | GGATTATTCTCTCTGGACAG(TAG) | 2389 | 61 | 70 |
| 67 | 131392 | 1 | AGACCACCGTCCAGAAAGAA(GAG) | 2390 | 55 | 69 |
| | 131352 | −1 | TCTGGATTATTCTCTCTGGA(CAG) | 2391 | 55 | 83 |
| 68 | 131411 | 1 | AGAGATGCACAATAGCCCGA(CAG) | 2392 | 86 | 91 |
| | 131349 | −1 | GGATTATTCTCTCTGGACAG(TAG) | 2393 | 61 | 70 |
| 69 | 131411 | 1 | AGAGATGCACAATAGCCCGA(CAG) | 2394 | 86 | 91 |
| | 131352 | −1 | TCTGGATTATTCTCTCTGGA(CAG) | 2395 | 55 | 83 |
| 70 | 134360 | 1 | TCAGGGTCTAGAAAGACGAA(CAG) | 2396 | 68 | 69 |
| | 134315 | −1 | TACGTTTCTGAAATTGCAAG(CAG) | 2397 | 55 | 78 |
| 71 | 135192 | 1 | TCACTGCAAACACAACCCTG(AGG) | 2398 | 65 | 77 |
| | 135158 | −1 | GCAACCTTGAGACATGAGGT(AGG) | 2399 | 70 | 64 |
| 72 | 135192 | 1 | TCACTGCAAACACAACCCTG(AGG) | 2400 | 65 | 77 |
| | 135162 | −1 | GTGAGCAACCTTGAGACATG(AGG) | 2401 | 69 | 67 |
| 73 | 138647 | 1 | GTTTACATATTATTTTAACG(AAG) | 2402 | 54 | 90 |
| | 138593 | −1 | TCCATCATCCAAGTATTCAA(CAG) | 2403 | 65 | 67 |
| 74 | 140490 | 1 | AATCATTGTAACAAGCCCTA(CAG) | 2404 | 71 | 64 |
| | 140459 | −1 | ATTTGCCACATCCAACCCCA(GAG) | 2405 | 51 | 87 |
| 75 | 140966 | 1 | TTGCTGGTGGGCACACCAGA(GAG) | 2406 | 63 | 68 |
| | 140940 | −1 | ACCAGCAAGAAAGTTCCCAC(CAG) | 2407 | 68 | 67 |
| 76 | 141112 | 1 | CTATATTCCATTCATGAAGG(CAG) | 2408 | 56 | 64 |
| | 141052 | −1 | GAGTGAGTTAGATATCACAA(GAG) | 2409 | 71 | 75 |
| 77 | 144318 | 1 | TGTAGTCTCAGCTACTAGGG(AGG) | 2410 | 60 | 74 |
| | 144285 | −1 | AGGTGAGCACCACTATGCCC(GGG) | 2411 | 78 | 62 |
| 78 | 156887 | 1 | CACTCCCATCAACAGTGTGT(AGG) | 2412 | 72 | 69 |
| | 156842 | −1 | AACCATAATGGAAGACTGTG(TGG) | 2413 | 60 | 64 |
| 79 | 161670 | 1 | GTAGCCTAATGGTTTCCATG(GGG) | 2414 | 68 | 77 |
| | 161635 | −1 | CGTTTTCCAGCCGCTCCCTG(TGG) | 2415 | 62 | 63 |
| 80 | 163858 | 1 | CATGACCCTGTAGATACTGA(AGG) | 2416 | 68 | 65 |
| | 163829 | −1 | TCATGGTTTCAGAACCCCAA(GGG) | 2417 | 65 | 70 |
| 81 | 168112 | 1 | TTTCAGTCCCCATTAATGAA(CAG) | 2418 | 59 | 64 |
| | 168072 | −1 | GCATGCCAAGAACTTGACAG(AAG) | 2419 | 62 | 95 |
| 82 | 168112 | 1 | TTTCAGTCCCCATTAATGAA(CAG) | 2420 | 59 | 64 |
| | 168075 | −1 | ACAGCATGCCAAGAACTTGA(CAG) | 2421 | 58 | 72 |
| 83 | 170725 | 1 | TTTTGGTTACTGTAGCCTTG(TAG) | 2422 | 65 | 63 |
| | 170689 | −1 | GCATGGTACTGGTACCAAAA(CAG) | 2423 | 74 | 63 |
| 84 | 180194 | 1 | CATGACCTGCCAACATGCTG(GGG) | 2424 | 65 | 63 |
| | 180140 | −1 | CAGGAGTTTGAGACTAGCCT(GGG) | 2425 | 63 | 69 |

*Searching was based on WT Cas9 PAMs, 84 solutions out of ~37,500 possible pairs shown.

### Nucleobase Editors for Use in the Invention

[0112] The methods of editing ion channel-encoding genes in neurons (e.g., DRG neurons) for pain suppression are enabled by the use of the nucleobase editors. As described herein, a nucleobase editor is a fusion protein comprising: (i) a programmable DNA binding protein domain; and (ii) a deaminase domain. Any programmable DNA binding domain may be used in the based editors.

[0113] In some embodiments, the programmable DNA binding protein domain comprises the DNA binding domain of a zinc finger nuclease (ZFN) or a transcription activator-like effector domain (TALE). In some embodiments, the programmable DNA binding protein domain may be programmed by a guide nucleotide sequence and is thus referred as a “guide nucleotide sequence-programmable DNA binding-protein domain.” In some embodiments, the guide nucleotide sequence-programmable DNA binding protein is a nuclease inactive Cas9, or dCas9. A dCas9 as used herein, encompasses a Cas9 that is completely inactive with respect to its nuclease activity, or partially inactive with respect to its nuclease activity (e.g., a Cas9 nickase). Thus, in some embodiments, the guide nucleotide sequence-programmable DNA binding protein is a Cas9 nickase. In some embodiments, the guide nucleotide sequence-programmable DNA binding protein is a nuclease inactive Cpf1. In some embodiments, the guide nucleotide sequence-programmable DNA binding protein is a nuclease inactive Argonaute.

[0114] In some embodiments, the guide nucleotide sequence-programmable DNA binding protein is a dCas9 domain. In some embodiments, the guide nucleotide sequence-programmable DNA binding protein is a Cas9 nickase. In some embodiments, the dCas9 domain comprises the amino acid sequence of SEQ ID NO: 2 or SEQ ID NO: 3. In some embodiments, the dCas9 domain comprises an amino acid sequence that is at least 60%, at least 65%, at least 70%, at least 75%, at least 80%, at least 85%, at least 90%, at least 91%, at least 92%, at least 93%, at least 94%, at least 95%, at least 96%, at least 97%, at least 98%, at least 99%, or at least 99.5% identical to any one of the Cas9 domains provided herein (e.g., SEQ ID NOs: 11-260), and comprises mutations corresponding to D10X (X is any amino acid except for D) and/or H840X (X is any amino acid except for H) in SEQ ID NO: 1. In some embodiments, the dCas9 domain comprises an amino acid sequence that is at least 60%, at least 65%, at least 70%, at least 75%, at least 80%, at least 85%, at least 90%, at least 91%, at least 92%, at least 93%, at least 94%, at least 95%, at least 96%, at least 97%, at least 98%, at least 99%, or at least 99.5% identical to any one of the Cas9 domains provided herein (e.g., SEQ ID NOs: 11-260), and comprises mutations corresponding to D10A and/or H840A in SEQ ID NO: 1. In some embodiments, the Cas9 nickase comprises an amino acid sequence that is at least 60%, at least 65%, at least 70%, at least 75%, at least 80%, at least 85%, at least 90%, at least 91%, at least 92%, at least 93%, at least 94%, at least 95%, at least 96%, at least 97%, at least 98%, at least 99%, or at least 99.5% identical to any one of the Cas9 domains provided herein (e.g., SEQ ID NOs: 11-260), and comprises mutations corresponding to D10X (X is any amino acid except for D) in SEQ ID NO: 1 and a histidine at the position corresponding to position 840 in SEQ ID NO: 1. In some embodiments, the Cas9 nickase comprises an amino acid sequence that is at least 60%, at least 65%, at least 70%, at least 75%, at least 80%, at least 85%, at least 90%, at least 91%, at least 92%, at least 93%, at least 94%, at least 95%, at least 96%, at least 97%, at least 98%, at least 99%, or at least 99.5% identical to any one of the Cas9 domains provided herein (e.g., SEQ ID NOs: 11-260), and comprises mutations corresponding to D10A in SEQ ID NO: 1 and a histidine at the position corresponding to position 840 in SEQ ID NO: 1. In some embodiments, variants or homologues of dCas9 or Cas9 nickase (e.g., variants of SEQ ID NO: 2 or SEQ ID NO: 3, respectively) are provided which are at least about 70% identical, at least about 80% identical, at least about 90% identical, at least about 95% identical, at least about 98% identical, at least about 99% identical, at least about 99.5% identical, or at least about 99.9% to SEQ ID NO: 2 or SEQ ID NO: 3, respectively, and comprises mutations corresponding to D10A and/or H840A in SEQ ID NO: 1. In some embodiments, variants of Cas9 (e.g., variants of SEQ ID NO: 2) are provided having amino acid sequences which are shorter, or longer than SEQ ID NO: 2, by about 5 amino acids, by about 10 amino acids, by about 15 amino acids, by about 20 amino acids, by about 25 amino acids, by about 30 amino acids, by about 40 amino acids, by about 50 amino acids, by about 75 amino acids, by about 100 amino acids, or more, provided that the dCas9 variants comprise mutations corresponding to D10A and/or H840A in SEQ ID NO: 1. In some embodiments, variants of Cas9 nickase (e.g., variants of SEQ ID NO: 3) are provided having amino acid sequences which are shorter, or longer, than SEQ ID NO: 3, by about 5 amino acids, by about 10 amino acids, by about 15 amino acids, by about 20 amino acids, by about 25 amino acids, by about 30 amino acids, by about 40 amino acids, by about 50 amino acids, by about 75 amino acids, by about 100 amino acids, or more, provided that the dCas9 variants comprise mutations corresponding to D10A and comprises a histidine at the position corresponding to position 840 in SEQ ID NO: 1.

[0115] Additional suitable nuclease-inactive dCas9 domains will be apparent to those of skill in the art based on this disclosure and knowledge in the field, and are within the scope of this disclosure. Such additional exemplary suitable nuclease-inactive Cas9 domains include, but are not limited to, D10A/H840A, D10A/D839A/H840A, and D10A/D839A/H840A/N863A mutant domains (See, e.g., Prashant et al., Nature Biotechnology. 2013; 31(9): 833-838, which are incorporated herein by reference), or K603R (See, e.g., Chavez et al., Nature Methods 12, 326-328, 2015, which is incorporated herein by reference.

[0116] In some embodiments, the nucleobase editors described herein comprise a Cas9 domain with decreased electrostatic interactions between the Cas9 domain and the sugar-phosphate backbone of a target DNA, as compared to a wild-type Cas9 domain. In some embodiments, a Cas9 domain comprises one or more mutations that decreases the association between the Cas9 domain and a sugar-phosphate backbone of a DNA. In some embodiments, the nucleobase editors useful in the present disclosure comprises a dCas9 (e.g., with D10A and H840A mutations) or a Cas9 nickase (e.g., with D10A mutation), wherein the dCas9 or the Cas9 nickase further comprises one or more of a N497X, a R661X, a Q695X, and/or a Q926X mutation of the amino acid sequence provided in SEQ ID NO: 1, or a corresponding mutation in any of the amino acid sequences provided in SEQ ID NOs: 11-260, wherein X is any amino acid. In some embodiments, the nucleobase editors described herein comprises a dCas9 (e.g., with D10A and H840A mutations) or a Cas9 nickase (e.g., with D10A mutation), wherein the dCas9 or the Cas9 nickase further comprises one or more of a N497A, a R661A, a Q695A, and/or a Q926A mutation of the amino acid sequence provided in SEQ ID NO: 1, or a corresponding mutation in any of the amino acid sequences provided in SEQ ID NOs: 11-260. In some embodiments, the dCas9 domain (e.g., of any of the nucleobase editors provided herein) comprises the amino acid sequence as set forth in any one of SEQ ID NOs: 2-9. In some embodiments, the nucleobase editor comprises the amino acid sequence as set forth in any one of SEQ ID NOs: 10 or 293-302.

Cas9 variant with decreased electrostatic interactions between the Cas9 and DNA backbone
DKKYSIGLAIGTNSVGWAVITDEYKVPSKKFKVLGNTDRHSIKKNLIGALLFDSGETALATRLKRTARR
RYTRRKNRICYLQEIFSNEMAKVDDSFFHRLEESFLVEEDKKHERHPIFGNIVDEVAYHEKYPTIYHLRK
KLVDSTDKADLRLIYLALAHMIKFRGHFLIEGDLNPDNSDVDKLFIQLVQTYNQLFEENPINASGVDAK
AILSARLSKSRRLENLIAQLPGEKKNGLFGNLIALSLGLTPNFKSNFDLAEDAKLQLSKDTYDDDLDNLL
AQIGDQYADLFLAAKNLSDAILLSDILRVNTEITKAPLSASMIKRYDEHHQDLTLLKALVRQQLPEKYK
EIFFDQSKNGYAGYIDGGASQEEFYKFIKPILEKMDGTEELLVKLNREDLLRKQRTFDNGSIPHQIHLGE
LHAILRRQEDFYPFLKDNREKIEKILTFRIPYYVGPLARGNSRFAWMTRKSEETITPWNFEEVVDKGASA
QSFIERMTAFDKNLPNEKVLPKHSLLYEYFTVYNELTKVKYVTEGMRKPAFLSGEQKKAIVDLLFKTN
RKVTVKQLKEDYFKKIECFDSVEISGVEDRFNASLGTYHDLLKIIKDKDFLDNEENEDILEDIVLTLTLFE
DREMIEERLKTYAHLFDDKVMKQLKRRRYTGWGALSRKLINGIRDKQSGKTILDFLKSDGFANRNFM
ALIHDDSLTFKEDIQKAQVSGQGDSLHEHIANLAGSPAIKKGILQTVKVVDELVKVMGRHKPENIVIEM
ARENQTTQKGQKNSRERMKRIEEGIKELGSQILKEHPVENTQLQNEKLYLYYLQNGRDMYVDQELDIN
RLSDYDVDHIVPQSFLKDDSIDNKVLTRSDKNRGKSDNVPSEEVVKKMKNYWRQLLNAKLITQRKFD
NLTKAERGGLSELDKAGFIKRQLVETRAITKHVAQILDSRMNTKYDENDKLIREVKVITLKSKLVSDFR
KDFQFYKVREINNYHHAHDAYLNAVVGTALIKKYPKLESEFVYGDYKVYDVRKMIAKSEQEIGKATA
KYFFYSNIMNFFKTEITLANGEIRKRPLIETNGETGEIVWDKGRDFATVRKVLSMPQVNIVKKTEVQTG
GFSKESILPKRNSDKLIARKKDWDPKKYGGFDSPTVAYSVLVVAKVEKGKSKKLKSVKELLGITIMERS
SFEKNPIDFLEAKGYKEVKKDLIIKLPKYSLFELENGRKRMLASAGELQKGNELALPSKYVNFLYLASH
YEKLKGSPEDNEQKQLFVEQHKHYLDEIIEQISEFSKRVILADANLDKVLSAYNKHRDKPIREQAENIIH
LFTLTNLGAPAAFKYFDTTIDRKRYTSTKEVLDATLIHQSITGLYETRIDLSQLGGD (SEQ ID NO: 9,
mutations relative to SEQ ID NO: 1 are bolded and underlined)
High fidelity nucleobase editor
msSETGPVAVDPTLRRRIEPHEFEVFFDPRELRKETCLLYEINWGGRHSIWRHTSQNTNKHVEVNFIEKF
TTERYFCPNTRCSITWFLSWSPCGECSRAITEFLSRYPHVTLFIYIARLYHHADPRNRQGLRDLISSGVTI
QIMTEQESGYCWRNFVNYSPSNEAHWPRYPHLWVRLYVLELYCIILGLPPCLNILRRKQPQLTFFTIALQ
SCHYQRLPPHILWATGLKSGSETPGTSESATPESDKKYSIGLAIGTNSVGWAVITDEYKVPSKKFKVLG
NTDRHSIKKNLIGALLFDSGETALATRLKRTARRRYTRRKNRICYLQEIFSNEMAKVDDSFFHRLEESFL
VEEDKKHERHPIFGNIVDEVAYHEKYPTIYHLRKKLVDSTDKADLRLIYLALAHMIKFRGHFLIEGDLN
PDNSDVDKLFIQLVQTYNQLFEENPINASGVDAKAILSARLSKSRRLENLIAQLPGEKKNGLFGNLIALS
LGLTPNFKSNFDLAEDAKLQLSKDTYDDDLDNLLAQIGDQYADLFLAAKNLSDAILLSDILRVNTEITK
APLSASMIKRYDEHHQDLTLLKALVRQQLPEKYKEIFFDQSKNGYAGYIDGGASQEEFYKFIKPILEKM
DGTEELLVKLNREDLLRKQRTFDNGSIPHQIHLGELHAILRRQEDFYPFLKDNREKIEKILTFRIPYYVGP
LARGNSRFAWMTRKSEETITPWNFEEVVDKGASAQSFIERMTAFDKNLPNEKVLPKHSLLYEYFTVYN
ELTKVKYVTEGMRKPAFLSGEQKKAIVDLLFKTNRKVTVKQLKEDYFKKIECFDSVEISGVEDRFNASL
GTYHDLLKIIKDKDFLDNEENEDILEDIVLTLTLFEDREMIEERLKTYAHLFDDKVMKQLKRRRYTGWG
ALSRKLINGIRDKQSGKTILDFLKSDGFANRNFMALIHDDSLTFKEDIQKAQVSGQGDSLHEHIANLAGS
PAIKKGILQTVKVVDELVKVMGRHKPENIVIEMARENQTTQKGQKNSRERMKRIEEGIKELGSQILKEH
PVENTQLQNEKLYLYYLQNGRDMYVDQELDINRLSDYDVDHIVPQSFLKDDSIDNKVLTRSDKNRGKS
DNVPSEEVVKKMKNYWRQLLNAKLITQRKFDNLTKAERGGLSELDKAGFIKRQLVETRAITKHVAQIL
DSRMNTKYDENDKLIREVKVITLKSKLVSDFRKDFQFYKVREINNYHHAHDAYLNAVVGTALIKKYPK
LESEFVYGDYKVYDVRKMIAKSEQEIGKATAKYFFYSNIMNFFKTEITLANGEIRKRPLIETNGETGEIV
WDKGRDFATVRKVLSMPQVNIVKKTEVQTGGFSKESILPKRNSDKLIARKKDWDPKKYGGFDSPTVA
YSVLVVAKVEKGKSKKLKSVKELLGITIMERSSFEKNPIDFLEAKGYKEVKKDLIIKLPKYSLFELENGR
KRMLASAGELQKGNELALPSKYVNFLYLASHYEKLKGSPEDNEQKQLFVEQHKHYLDEIIEQISEFSKR
VILADANLDKVLSAYNKHRDKPIREQAENIIHLFTLTNLGAPAAFKYFDTTIDRKRYTSTKEVLDATLIH
QSITGLYETRIDLSQLGGD (SEQ ID NO: 321)

[0117] In some embodiments, the guide nucleotide sequence-programmable DNA binding protein is a single effector of a microbial CRISPR-Cas system. Single effectors of microbial CRISPR-Cas systems include, without limitation, Cas9, Cpf1, C2c1, C2c2, and C2c3. Typically, microbial CRISPR-Cas systems are divided into Class 1 and Class 2 systems. Class 1 systems have multisubunit effector complexes, while Class 2 systems have a single protein effector. Cas9 and Cpf1 are Class 2 effectors. In addition to Cas9 and Cpf1, three distinct Class 2 CRISPR-Cas systems (C2c1, C2c2, and C2c3) have been described by Shmakov et al., “Discovery and Functional Characterization of Diverse Class 2 CRISPR Cas Systems”, Mol. Cell, 2015 Nov. 5; 60(3): 385-397, the entire contents of which are herein incorporated by reference. Effectors of two of the systems, C2c1 and C2c3, contain RuvC-like endonuclease domains related to Cpf1. A third system, C2c2 contains an effector with two predicted HEPN RNase domains. Production of mature CRISPR RNA is tracrRNA-independent, unlike production of CRISPR RNA by C2c1. C2c1 depends on both CRISPR RNA and tracrRNA for DNA cleavage. Bacterial C2c2 has been shown to possess a unique RNase activity for CRISPR RNA maturation distinct from its RNA-activated single-stranded RNA degradation activity. These RNase functions are different from each other and from the CRISPR RNA-processing behavior of Cpf1. See, e.g., East-Seletsky, et al., “Two distinct RNase activities of CRISPR-C2c2 enable guide-RNA processing and RNA detection”, Nature, 2016 Oct. 13; 538(7624):270-273, the entire contents of which are hereby incorporated by reference. In vitro biochemical analysis of C2c2 in Leptotrichia shahii has shown that C2c2 is guided by a single CRISPR RNA and can be programmed to cleave ssRNA targets carrying complementary protospacers. Catalytic residues in the two conserved HEPN domains mediate cleavage. Mutations in the catalytic residues generate catalytically inactive RNA-binding proteins. See e.g., Abudayyeh et al., “C2c2 is a single-component programmable RNA-guided RNA-targeting CRISPR effector,” Science, 2016 Aug. 5; 353(6299), the entire contents of which are hereby incorporated by reference.

[0118] The crystal structure of Alicyclobaccillus acidoterrastris C2c1 (AacC2c1) has been reported in complex with a chimeric single-molecule guide RNA (sgRNA). See, e.g., Liu et al., “C2c1-sgRNA Complex Structure Reveals RNA-Guided DNA Cleavage Mechanism”, Mol. Cell, 2017 Jan. 19; 65(2):310-322, incorporated herein by reference. The crystal structure has also been reported for Alicyclobacillus acidoterrestris C2c1 bound to target DNAs as ternary complexes. See, e.g., Yang et al., “PAM-dependent Target DNA Recognition and Cleavage by C2C1 CRISPR-Cas endonuclease”, Cell, 2016 Dec. 15; 167(7):1814-1828, the entire contents of which are hereby incorporated by reference. Catalytically competent conformations of AacC2c1, both with target and non-target DNA strands, have been captured independently positioned within a single RuvC catalytic pocket, with C2c1-mediated cleavage resulting in a staggered seven-nucleotide break of target DNA. Structural comparisons between C2c1 ternary complexes and previously identified Cas9 and Cpf1 counterparts demonstrate the diversity of mechanisms used by CRISPR-Cas9 systems.

[0119] In some embodiments, the nucleobase editors described herein comprise a C2c1, a C2c2, or a C2c3 protein. In some embodiments, the guide nucleotide sequence-programmable DNA binding protein is a C2c1 protein. In some embodiments, the guide nucleotide sequence-programmable DNA binding protein is a C2c2 protein. In some embodiments, the guide nucleotide sequence-programmable DNA binding protein is a C2c3 protein. In some embodiments, the guide nucleotide sequence-programmable DNA binding protein comprises an amino acid sequence that is at least 85%, at least 90%, at least 91%, at least 92%, at least 93%, at least 94%, at least 95%, at least 96%, at least 97%, at least 98%, at least 99%, or at least 99.5% identical to a naturally-occurring C2c1, C2c2, or C2c3 protein. In some embodiments, the guide nucleotide sequence-programmable DNA binding protein is a naturally-occurring C2c1, C2c2, or C2c3 protein. In some embodiments, the guide nucleotide sequence-programmable DNA binding protein comprises an amino acid sequence that is at least 85%, at least 90%, at least 91%, at least 92%, at least 93%, at least 94%, at least 95%, at least 96%, at least 97%, at least 98%, at least 99%, or at least 99.5% identical to any one of SEQ ID NOs: 756-758. In some embodiments, the guide nucleotide sequence-programmable DNA binding protein comprises an amino acid sequence of any one SEQ ID NOs: 756-758. It should be appreciated that C2c1, C2c2, or C2c3 from other bacterial species may also be used in accordance with the present disclosure.

C2c1 (uniprot.org/uniprot/T0D7A2#)
sp|T0D7A2|C2C1_ALIAG CRISPR-associated endonuclease C2c1 OS = Alicyclobacillus
acidoterrestris (strain ATCC 49025 / DSM 3922 / CIP 106132 / NCIMB 13137 / GD3B)
GN = c2c1 PE = 1 SV = 1
(SEQ ID NO: 2470)
MAVKSIKVKLRLDDMPEIRAGLWKLHKEVNAGVRYYTEWLSLLRQENLYRRSPNGDGEQECDKTAE
ECKAELLERLRARQVENGHRGPAGSDDELLQLARQLYELLVPQAIGAKGDAQQIARKFLSPLADKDAV
GGLGIAKAGNKPRWVRMREAGEPGWEEEKEKAETRKSADRTADVLRALADFGLKPLMRVYTDSEMS
SVEWKPLRKGQAVRTWDRDMFQQAIERMMSWESWNQRVGQEYAKLVEQKNRFEQKNFVGQEHLV
HLVNQLQQDMKEASPGLESKEQTAHYVTGRALRGSDKVFEKWGKLAPDAPFDLYDALIKNVQRRNT
RRFGSHDLFAKLAEPEYQALWREDASFLTRYAVYNSILRKLNHAKMFATFTLPDATAHPIWTRFDKLG
GNLHQYTFLFNEFGERRHAIRFHKLLKVENGVAREVDDVTVPISMSEQLDNLLPRDPNEPIALYFRDYG
AEQHFTGEFGGAKIQCRRDQLAHMHRRRGARDVYLNVSVRVQSQSEARGERRPPYAAVFRLVGDNH
RAFVHFDKLSDYLAEHPDDGKLGSEGLLSGLRVMSVDLGLRTSASISVFRVARKDELKPNSKGRVPFFF
PIKGNDNLVAVHERSQLLKLPGETESKDLRAIREERQRTLRQLRTQLAYLRLLVRCGSEDVGRRERSW
AKLIEQPVDAANHMTPDWREAFENELQKLKSLHGICSDKEWMDAVYESVRRVWRHMGKQVRDWRK
DVRSGERPKIRGYAKDVVGGNSIEQIEYLERQYKFLKSWSFFGKVSGQVIRAEKGSRFAITLREHIDHAK
EDRLKKLADRIIMEALGYVYALDERGKGKWVAKYPPCQLILLEELSEYQFNNDRPPSENNQLMQWSH
RGVFQELINQAQVHDLLVGTMYAAFSSRFDARTGAPGIRCRRVPARCTQEHNPEPFPWWLNKFVVEHT
LDACPLRADDLIPTGEGEIFVSPFSAEEGDFHQIHADLNAAQNLQQRLWSDFDISQIRERCDWGEVDGE
LVLIPRLTGKRTADSYSNKVFYTNTGVTYYERERGKKRRKVFAQEKLSEEEAELLVEADEAREKSVVL
MRDPSGIINRGNWTRQKEFWSMVNQRIEGYLVKQIRSRVPLQDSACENTGDI
C2c2 (uniprot.org/uniprot/P0DOC6)
>sp|P0DOC6|C2C2_LEPSD CRISPR-associated endoribonuclease C2c2 OS = Leptotrichia
shahii (strain DSM 19757 / CCUG 47503 / CIP 107916 / JCM 16776 / LB37) GN = c2c2
PE = 1 SV = 1
(SEQ ID NO: 2471)
MGNLFGHKRWYEVRDKKDFKIKRKVKVKRNYDGNKYILNINENNNKEKIDNNKFIRKYINYKKNDNI
LKEFTRKFHAGNILFKLKGKEGIIRIENNDDFLETEEVVLYIEAYGKSEKLKALGITKKKIIDEAIRQGITK
DDKKIEIKRQENEEEIEIDIRDEYTNKTLNDCSIILRIIENDELETKKSIYEIFKNINMSLYKIIEKIIENETEK
VFENRYYEEHLREKLLKDDKIDVILTNFMEIREKIKSNLEILGFVKFYLNVGGDKKKSKNKKMLVEKIL
NINVDLTVEDIADFVIKELEFWNITKRIEKVKKVNNEFLEKRRNRTYIKSYVLLDKHEKFKIERENKKDK
IVKFFVENIKNNSIKEKIEKILAEFKIDELIKKLEKELKKGNCDTEIFGIFKKHYKVNFDSKKFSKKSDEEK
ELYKIIYRYLKGRIEKILVNEQKVRLKKMEKIEIEKILNESILSEKILKRVKQYTLEHIMYLGKLRHNDID
MTTVNTDDFSRLHAKEELDLELITFFASTNMELNKIFSRENINNDENIDFFGGDREKNYVLDKKILNSKI
KIIRDLDFIDNKNNITNNFIRKFTKIGTNERNRILHAISKERDLQGTQDDYNKVINIIQNLKISDEEVSKAL
NLDVVFKDKKNIITKINDIKISEENNNDIKYLPSFSKVLPEILNLYRNNPKNEPFDTIETEKIVLNALIYVN
KELYKKLILEDDLEENESKNIFLQELKKTLGNIDEIDENIIENYYKNAQISASKGNNKAIKKYQKKVIECY
IGYLRKNYEELFDFSDFKMNIQEIKKQIKDINDNKTYERITVKTSDKTIVINDDFEYIISIFALLNSNAVIN
KIRNRFFATSVWLNTSEYQNIIDILDEIMQLNTLRNECITENWNLNLEEFIQKMKEIEKDFDDFKIQTKKE
IFNNYYEDIKNNILTEFKDDINGCDVLEKKLEKIVIFDDETKFEIDKKSNILQDEQRKLSNINKKDLKKKV
DQYIKDKDQEIKSKILCRIIFNSDFLKKYKKEIDNLIEDMESENENKFQEIYYPKERKNELYIYKKNLFLNI
GNPNFDKIYGLISNDIKMADAKFLFNIDGKNIRKNKISEIDAILKNLNDKLNGYSKEYKEKYIKKLKEND
DFFAKNIQNKNYKSFEKDYNRVSEYKKIRDLVEFNYLNKIESYLIDINWKLAIQMARFERDMHYIVNGL
RELGIIKLSGYNTGISRAYPKRNGSDGFYTTTAYYKFFDEESYKKFEKICYGFGIDLSENSEINKPENESIR
NYISHFYIVRNPFADYSIAEQIDRVSNLLSYSTRYNNSTYASVFEVFKKDVNLDYDELKKKFKLIGNNDI
LERLMKPKKVSVLELESYNSDYIKNLIIELLTKIENTNDTL
C2c3, translated from >CEPX01008730.1 marine metagenome genome assembly
TARA_037_MES_0.1-0.22, contig TARA_037_MES_0.1-0.22_scaffold22115_1, whole
genome shotgun sequence.
(SEQ ID NO: 2472)
MRSNYHGGRNARQWRKQISGLARRTKETVFTYKFPLETDAAEIDFDKAVQTYGIAEGVGHGSLIGLVC
AFHLSGFRLFSKAGEAMAFRNRSRYPTDAFAEKLSAIMGIQLPTLSPEGLDLIFQSPPRSRDGIAPVWSE
NEVRNRLYTNWTGRGPANKPDEHLLEIAGEIAKQVFPKFGGWDDLASDPDKALAAADKYFQSQGDFP
SIASLPAAIMLSPANSTVDFEGDYIAIDPAAETLLHQAVSRCAARLGRERPDLDQNKGPFVSSLQDALVS
SQNNGLSWLFGVGFQHWKEKSPKELIDEYKVPADQHGAVTQVKSFVDAIPLNPLFDTTHYGEFRASVA
GKVRSWVANYWKRLLDLKSLLATTEFTLPESISDPKAVSLFSGLLVDPQGLKKVADSLPARLVSAEEAI
DRLMGVGIPTAADIAQVERVADEIGAFIGQVQQFNNQVKQKLENLQDADDEEFLKGLKIELPSGDKEPP
AINRISGGAPDAAAEISELEEKLQRLLDARSEHFQTISEWAEENAVTLDPIAAMVELERLRLAERGATGD
PEEYALRLLLQRIGRLANRVSPVSAGSIRELLKPVFMEEREFNLFFHNRLGSLYRSPYSTSRHQPFSIDVG
KAKAIDWIAGLDQISSDIEKALSGAGEALGDQLRDWINLAGFAISQRLRGLPDTVPNALAQVRCPDDVR
IPPLLAMLLEEDDIARDVCLKAFNLYVSAINGCLFGALREGFIVRTRFQRIGTDQIHYVPKDKAWEYPDR
LNTAKGPINAAVSSDWIEKDGAVIKPVETVRNLSSTGFAGAGVSEYLVQAPHDWYTPLDLRDVAHLVT
GLPVEKNITKLKRLTNRTAFRMVGASSFKTHLDSVLLSDKIKLGDFTIIIDQHYRQSVTYGGKVKISYEP
ERLQVEAAVPVVDTRDRTVPEPDTLFDHIVAIDLGERSVGFAVFDIKSCLRTGEVKPIHDNNGNPVVGT
VAVPSIRRLMKAVRSHRRRRQPNQKVNQTYSTALQNYRENVIGDVCNRIDTLMERYNAFPVLEFQIKN
FQAGAKQLEIVYGS

[0120] The Cas9 protein recognizes a short motif (PAM motif) in the CRISPR repeat sequences in the target DNA sequence. A “PAM motif,” or “protospacer adjacent motif,” as used herein, refers to a DNA sequence immediately following the DNA sequence targeted by the Cas9 nuclease in the CRISPR bacterial adaptive immune system. PAM is a component of the invading virus or plasmid but is not a component of the bacterial CRISPR locus. Wild-type Streptococcus pyogenes Cas9 recognizes a canonical PAM sequence (5′-NGG-3′). Other Cas9 nucleases (e.g., Cas9 from Streptococcus thermophiles, Staphylococcus aureus, Neisseria meningitidis, or Treponema denticolaor) and Cas9 variants thereof have been described in the art to have different, or more relaxed PAM requirements. For example, in Kleinstiver et al., Nature 523, 481-485, 2015; Klenstiver et al., Nature 529, 490-495, 2016; Ran et al., Nature, Apr. 9; 520(7546): 186-191, 2015; Kleinstiver et al., Nat Biotechnol, 33(12):1293-1298, 2015; Hou et al., Proc Natl Acad Sci USA, 110(39):15644-9, 2014; Prykhozhij et al., PLoS One, 10(3): e0119372, 2015; Zetsche et al., Cell 163, 759-771, 2015; Gao et al., Nature Biotechnology, doi:10.1038/nbt.3547, 2016; Want et al., Nature 461, 754-761, 2009; Chavez et al., doi: dx.doi.org/10.1101/058974; Fagerlund et al., Genome Biol. 2015; 16: 25, 2015; Zetsche et al., Cell, 163, 759-771, 2015; and Swarts et al., Nat Struct Mol Biol, 21(9):743-53, 2014, each of which is incorporated herein by reference.

[0121] Thus, the guide nucleotide sequence-programmable DNA-binding proteins useful in the present disclosure may recognize a variety of PAM sequences including, without limitation: NGG, NGAN, NGNG, NGAG, NGCG, NNGRRT, NGRRN, NNNRRT, NNNGATT, NNAGAAW, NAAAC, TTN, TTTN, and YTN, wherein Y is a pyrimidine, and N is any nucleobase. In some embodiments, the PAM is located 3′ of the target base. In some embodiments, the PAM is located 5′ of the target base.

[0122] One example of an RNA-programmable DNA-binding protein that has different PAM specificity is Clustered Regularly Interspaced Short Palindromic Repeats from Prevotella and Francisella 1 (Cpf1). Similar to Cas9, Cpf1 is also a class 2 CRISPR effector. It has been shown that Cpf1mediates robust DNA interference with features distinct from Cas9. Cpf1 is a single RNA-guided endonuclease lacking tracrRNA, and it utilizes a T-rich protospacer-adjacent motif (TTN, TTTN, or YTN). Moreover, Cpf1 cleaves DNA via a staggered DNA double-stranded break. Out of 16 Cpf1-family proteins, two enzymes from Acidaminococcus and Lachnospiraceae are shown to have efficient genome-editing activity in human cells.

[0123] Also useful in the present disclosure are nuclease-inactive Cpf1 (dCpf1) variants that may be used as a guide nucleotide sequence-programmable DNA-binding protein domain. The Cpf1 protein has a RuvC-like endonuclease domain that is similar to the RuvC domain of Cas9 but does not have a HNH endonuclease domain, and the N-terminal of Cpf1 does not have the alfa-helical recognition lobe of Cas9. It was shown in Zetsche et al., Cell, 163, 759-771, 2015 (which is incorporated herein by reference) that, the RuvC-like domain of Cpf1 is responsible for cleaving both DNA strands and inactivation of the RuvC-like domain inactivates Cpf1 nuclease activity. For example, mutations corresponding to D917A, E1006A, or D1255A in Francisella novicida Cpf1 (SEQ ID NO: 10) inactivates Cpf1 nuclease activity. In some embodiments, the dCpf1 of the present disclosure comprises mutations corresponding to D917A, E1006A, D1255A, D917A/E1006A, D917A/D1255A, E1006A/D1255A, or D917A/E1006A/D1255A in SEQ ID NO: 10. It is to be understood that any mutations, e.g., substitution mutations, deletions, or insertions that inactivate the RuvC domain of Cpf1 may be used in accordance with the present disclosure.

[0124] Thus, in some embodiments, the guide nucleotide sequence-programmable DNA binding protein is a nuclease inactive Cpf1 (dCpf1). In some embodiments, the dCpf1 comprises the amino acid sequence of any one SEQ ID NOs: 261-267. In some embodiments, the dCpf1 comprises an amino acid sequence that is at least 85%, at least 90%, at least 91%, at least 92%, at least 93%, at least 94%, at least 95%, at least 96%, at least 97%, at least 98%, at least 99%, or at least 99.5% identical to SEQ ID NO: 10, and comprises mutations corresponding to D917A, E1006A, D1255A, D917A/E1006A, D917A/D1255A, E1006A/D1255A, or D917A/E1006A/D1255A in SEQ ID NO: 10. Cpf1 from other bacterial species may also be used in accordance with the present disclosure.

Wild type Francisella novicida Cpf1 (D917, E1006, and D1255 are
bolded and underlined)
(SEQ ID NO: 10)
MSIYQEFVNKYSLSKTLRFELIPQGKTLENIKARGLILDDEKRAKDYKKAKQIIDKYHQFFIEEILSSVCIS
EDLLQNYSDVYFKLKKSDDDNLQKDFKSAKDTIKKQISEYIKDSEKFKNLFNQNLIDAKKGQESDLILW
LKQSKDNGIELFKANSDITDIDEALEIIKSFKGWTTYFKGFHENRKNVYSSNDIPTSIIYRIVDDNLPKFLE
NKAKYESLKDKAPEAINYEQIKKDLAELLTFDIDYKTSEVNQRVFSLDEVFEIANFNNYLNQSGITKFNT
IIGGKFVNGENTKRKGINEYINLYSQQINDKTLKKYKMSVLFKQILSDTESKSFVIDKLEDDSDVVTTMQ
SFYEQIAAFKTVEEKSIKETLSLLFDDLKAQKLDLSKIYFKNDKSLTDLSQQVFDDYSVIGTAVLEYITQ
QIAPKNLDNPSKKEQELIAKKTEKAKYLSLETIKLALEEFNKHRDIDKQCRFEEILANFAAIPMIFDEIAQ
NKDNLAQISIKYQNQGKKDLLQASAEDDVKAIKDLLDQTNNLLHKLKIFHISQSEDKANILDKDEHFYL
VFEECYFELANIVPLYNKIRNYITQKPYSDEKFKLNFENSTLANGWDKNKEPDNTAILFIKDDKYYLGV
MNKKNNKIFDDKAIKENKGEGYKKIVYKLLPGANKMLPKVFFSAKSIKFYNPSEDILRIRNHSTHTKNG
SPQKGYEKFEFNIEDCRKFIDFYKQSISKHPEWKDFGFRFSDTQRYNSIDEFYREVENQGYKLTFENISES
YIDSVVNQGKLYLFQIYNKDFSAYSKGRPNLHTLYWKALFDERNLQDVVYKLNGEAELFYRKQSIPKK
ITHPAKEAIANKNKDNPKKESVFEYDLIKDKRFTEDKFFFHCPITINFKSSGANKFNDEINLLLKEKAND
VHILSIDRGERHLAYYTLVDGKGNIIKQDTFNIIGNDRMKTNYHDKLAAIEKDRDSARKDWKKINNIKE
MKEGYLSQVVHEIAKLVIEYNAIVVFEDLNFGFKRGRFKVEKQVYQKLEKMLIEKLNYLVFKDNEFDK
TGGVLRAYQLTAPFETFKKMGKQTGIIYYVPAGFTSKICPVTGFVNQLYPKYESVSKSQEFFSKFDKICY
NLDKGYFEFSFDYKNFGDKAAKGKWTIASFGSRLINFRNSDKNHNWDTREVYPTKELEKLLKDYSIEY
GHGECIKAAICGESDKKFFAKLTSVLNTILQMRNSKTGTELDYLISPVADVNGNFFDSRQAPKNMPQDA
DANGAYHIGLKGLMLLGRIKNNQEGKKLNLVIKNEEYFEFVQNRNN
Francisella novicida Cpf1 D917A (A917, E1006, and D1255 are
bolded and underlined)
(SEQ ID NO: 261)
MSIYQEFVNKYSLSKTLRFELIPQGKTLENIKARGLILDDEKRAKDYKKAKQIIDKYHQFFIEEILSSVCIS
EDLLQNYSDVYFKLKKSDDDNLQKDFKSAKDTIKKQISEYIKDSEKFKNLFNQNLIDAKKGQESDLILW
LKQSKDNGIELFKANSDITDIDEALEIIKSFKGWTTYFKGFHENRKNVYSSNDIPTSIIYRIVDDNLPKFLE
NKAKYESLKDKAPEAINYEQIKKDLAELLTFDIDYKTSEVNQRVFSLDEVFEIANFNNYLNQSGITKFNT
IIGGKFVNGENTKRKGINEYINLYSQQINDKTLKKYKMSVLFKQILSDTESKSFVIDKLEDDSDVVTTMQ
SFYEQIAAFKTVEEKSIKETLSLLFDDLKAQKLDLSKIYFKNDKSLTDLSQQVFDDYSVIGTAVLEYITQ
QIAPKNLDNPSKKEQELIAKKTEKAKYLSLETIKLALEEFNKHRDIDKQCRFEEILANFAAIPMIFDEIAQ
NKDNLAQISIKYQNQGKKDLLQASAEDDVKAIKDLLDQTNNLLHKLKIFHISQSEDKANILDKDEHFYL
VFEECYFELANIVPLYNKIRNYITQKPYSDEKFKLNFENSTLANGWDKNKEPDNTAILFIKDDKYYLGV
MNKKNNKIFDDKAIKENKGEGYKKIVYKLLPGANKMLPKVFFSAKSIKFYNPSEDILRIRNHSTHTKNG
SPQKGYEKFEFNIEDCRKFIDFYKQSISKHPEWKDFGFRFSDTQRYNSIDEFYREVENQGYKLTFENISES
YIDSVVNQGKLYLFQIYNKDFSAYSKGRPNLHTLYWKALFDERNLQDVVYKLNGEAELFYRKQSIPKK
ITHPAKEAIANKNKDNPKKESVFEYDLIKDKRFTEDKFFFHCPITINFKSSGANKFNDEINLLLKEKAND
VHILSIARGERHLAYYTLVDGKGNIIKQDTFNIIGNDRMKTNYHDKLAAIEKDRDSARKDWKKINNIKE
MKEGYLSQVVHEIAKLVIEYNAIVVFEDLNFGFKRGRFKVEKQVYQKLEKMLIEKLNYLVFKDNEFDK
TGGVLRAYQLTAPFETFKKMGKQTGIIYYVPAGFTSKICPVTGFVNQLYPKYESVSKSQEFFSKFDKICY
NLDKGYFEFSFDYKNFGDKAAKGKWTIASFGSRLINFRNSDKNHNWDTREVYPTKELEKLLKDYSIEY
GHGECIKAAICGESDKKFFAKLTSVLNTILQMRNSKTGTELDYLISPVADVNGNFFDSRQAPKNMPQDA
DANGAYHIGLKGLMLLGRIKNNQEGKKLNLVIKNEEYFEFVQNRNN
Francisella novicida Cpf1 E1006A (D917, A1006, and D1255 are
bolded and underlined)
(SEQ ID NO: 262)
MSIYQEFVNKYSLSKTLRFELIPQGKTLENIKARGLILDDEKRAKDYKKAKQIIDKYHQFFIEEILSSVCIS
EDLLQNYSDVYFKLKKSDDDNLQKDFKSAKDTIKKQISEYIKDSEKFKNLFNQNLIDAKKGQESDLILW
LKQSKDNGIELFKANSDITDIDEALEIIKSFKGWTTYFKGFHENRKNVYSSNDIPTSIIYRIVDDNLPKFLE
NKAKYESLKDKAPEAINYEQIKKDLAELLTFDIDYKTSEVNQRVFSLDEVFEIANFNNYLNQSGITKFNT
IIGGKFVNGENTKRKGINEYINLYSQQINDKTLKKYKMSVLFKQILSDTESKSFVIDKLEDDSDVVTTMQ
SFYEQIAAFKTVEEKSIKETLSLLFDDLKAQKLDLSKIYFKNDKSLTDLSQQVFDDYSVIGTAVLEYITQ
QIAPKNLDNPSKKEQELIAKKTEKAKYLSLETIKLALEEFNKHRDIDKQCRFEEILANFAAIPMIFDEIAQ
NKDNLAQISIKYQNQGKKDLLQASAEDDVKAIKDLLDQTNNLLHKLKIFHISQSEDKANILDKDEHFYL
VFEECYFELANIVPLYNKIRNYITQKPYSDEKFKLNFENSTLANGWDKNKEPDNTAILFIKDDKYYLGV
MNKKNNKIFDDKAIKENKGEGYKKIVYKLLPGANKMLPKVFFSAKSIKFYNPSEDILRIRNHSTHTKNG
SPQKGYEKFEFNIEDCRKFIDFYKQSISKHPEWKDFGFRFSDTQRYNSIDEFYREVENQGYKLTFENISES
YIDSVVNQGKLYLFQIYNKDFSAYSKGRPNLHTLYWKALFDERNLQDVVYKLNGEAELFYRKQSIPKK
ITHPAKEAIANKNKDNPKKESVFEYDLIKDKRFTEDKFFFHCPITINFKSSGANKFNDEINLLLKEKAND
VHILSIDRGERHLAYYTLVDGKGNIIKQDTFNIIGNDRMKTNYHDKLAAIEKDRDSARKDWKKINNIKE
MKEGYLSQVVHEIAKLVIEYNAIVVFADLNFGFKRGRFKVEKQVYQKLEKMLIEKLNYLVFKDNEFDK
TGGVLRAYQLTAPFETFKKMGKQTGIIYYVPAGFTSKICPVTGFVNQLYPKYESVSKSQEFFSKFDKICY
NLDKGYFEFSFDYKNFGDKAAKGKWTIASFGSRLINFRNSDKNHNWDTREVYPTKELEKLLKDYSIEY
GHGECIKAAICGESDKKFFAKLTSVLNTILQMRNSKTGTELDYLISPVADVNGNFFDSRQAPKNMPQDA
DANGAYHIGLKGLMLLGRIKNNQEGKKLNLVIKNEEYFEFVQNRNN
Francisella novicida Cpf1 D1255A (D917, E1006, and A1255 are
bolded and underlined)
(SEQ ID NO: 263)
MSIYQEFVNKYSLSKTLRFELIPQGKTLENIKARGLILDDEKRAKDYKKAKQIIDKYHQFFIEEILSSVCIS
EDLLQNYSDVYFKLKKSDDDNLQKDFKSAKDTIKKQISEYIKDSEKFKNLFNQNLIDAKKGQESDLILW
LKQSKDNGIELFKANSDITDIDEALEIIKSFKGWTTYFKGFHENRKNVYSSNDIPTSIIYRIVDDNLPKFLE
NKAKYESLKDKAPEAINYEQIKKDLAELLTFDIDYKTSEVNQRVFSLDEVFEIANFNNYLNQSGITKFNT
IIGGKFVNGENTKRKGINEYINLYSQQINDKTLKKYKMSVLFKQILSDTESKSFVIDKLEDDSDVVTTMQ
SFYEQIAAFKTVEEKSIKETLSLLFDDLKAQKLDLSKIYFKNDKSLTDLSQQVFDDYSVIGTAVLEYITQ
QIAPKNLDNPSKKEQELIAKKTEKAKYLSLETIKLALEEFNKHRDIDKQCRFEEILANFAAIPMIFDEIAQ
NKDNLAQISIKYQNQGKKDLLQASAEDDVKAIKDLLDQTNNLLHKLKIFHISQSEDKANILDKDEHFYL
VFEECYFELANIVPLYNKIRNYITQKPYSDEKFKLNFENSTLANGWDKNKEPDNTAILFIKDDKYYLGV
MNKKNNKIFDDKAIKENKGEGYKKIVYKLLPGANKMLPKVFFSAKSIKFYNPSEDILRIRNHSTHTKNG
SPQKGYEKFEFNIEDCRKFIDFYKQSISKHPEWKDFGFRFSDTQRYNSIDEFYREVENQGYKLTFENISES
YIDSVVNQGKLYLFQIYNKDFSAYSKGRPNLHTLYWKALFDERNLQDVVYKLNGEAELFYRKQSIPKK
ITHPAKEAIANKNKDNPKKESVFEYDLIKDKRFTEDKFFFHCPITINFKSSGANKFNDEINLLLKEKAND
VHILSIDRGERHLAYYTLVDGKGNIIKQDTFNIIGNDRMKTNYHDKLAAIEKDRDSARKDWKKINNIKE
MKEGYLSQVVHEIAKLVIEYNAIVVFEDLNFGFKRGRFKVEKQVYQKLEKMLIEKLNYLVFKDNEFDK
TGGVLRAYQLTAPFETFKKMGKQTGIIYYVPAGFTSKICPVTGFVNQLYPKYESVSKSQEFFSKFDKICY
NLDKGYFEFSFDYKNFGDKAAKGKWTIASFGSRLINFRNSDKNHNWDTREVYPTKELEKLLKDYSIEY
GHGECIKAAICGESDKKFFAKLTSVLNTILQMRNSKTGTELDYLISPVADVNGNFFDSRQAPKNMPQDA
AANGAYHIGLKGLMLLGRIKNNQEGKKLNLVIKNEEYFEFVQNRNN
Francisella novicida Cpf1 D917A/E1006A (A917, A1006, and
D1255 are bolded and underlined)
(SEQ ID NO: 264)
MSIYQEFVNKYSLSKTLRFELIPQGKTLENIKARGLILDDEKRAKDYKKAKQIIDKYHQFFIEEILSSVCIS
EDLLQNYSDVYFKLKKSDDDNLQKDFKSAKDTIKKQISEYIKDSEKFKNLFNQNLIDAKKGQESDLILW
LKQSKDNGIELFKANSDITDIDEALEIIKSFKGWTTYFKGFHENRKNVYSSNDIPTSIIYRIVDDNLPKFLE
NKAKYESLKDKAPEAINYEQIKKDLAELLTFDIDYKTSEVNQRVFSLDEVFEIANFNNYLNQSGITKFNT
IIGGKFVNGENTKRKGINEYINLYSQQINDKTLKKYKMSVLFKQILSDTESKSFVIDKLEDDSDVVTTMQ
SFYEQIAAFKTVEEKSIKETLSLLFDDLKAQKLDLSKIYFKNDKSLTDLSQQVFDDYSVIGTAVLEYITQ
QIAPKNLDNPSKKEQELIAKKTEKAKYLSLETIKLALEEFNKHRDIDKQCRFEEILANFAAIPMIFDEIAQ
NKDNLAQISIKYQNQGKKDLLQASAEDDVKAIKDLLDQTNNLLHKLKIFHISQSEDKANILDKDEHFYL
VFEECYFELANIVPLYNKIRNYITQKPYSDEKFKLNFENSTLANGWDKNKEPDNTAILFIKDDKYYLGV
MNKKNNKIFDDKAIKENKGEGYKKIVYKLLPGANKMLPKVFFSAKSIKFYNPSEDILRIRNHSTHTKNG
SPQKGYEKFEFNIEDCRKFIDFYKQSISKHPEWKDFGFRFSDTQRYNSIDEFYREVENQGYKLTFENISES
YIDSVVNQGKLYLFQIYNKDFSAYSKGRPNLHTLYWKALFDERNLQDVVYKLNGEAELFYRKQSIPKK
ITHPAKEAIANKNKDNPKKESVFEYDLIKDKRFTEDKFFFHCPITINFKSSGANKFNDEINLLLKEKAND
VHILSIARGERHLAYYTLVDGKGNIIKQDTFNIIGNDRMKTNYHDKLAAIEKDRDSARKDWKKINNIKE
MKEGYLSQVVHEIAKLVIEYNAIVVFADLNFGFKRGRFKVEKQVYQKLEKMLIEKLNYLVFKDNEFDK
TGGVLRAYQLTAPFETFKKMGKQTGIIYYVPAGFTSKICPVTGFVNQLYPKYESVSKSQEFFSKFDKICY
NLDKGYFEFSFDYKNFGDKAAKGKWTIASFGSRLINFRNSDKNHNWDTREVYPTKELEKLLKDYSIEY
GHGECIKAAICGESDKKFFAKLTSVLNTILQMRNSKTGTELDYLISPVADVNGNFFDSRQAPKNMPQDA
DANGAYHIGLKGLMLLGRIKNNQEGKKLNLVIKNEEYFEFVQNRNN
Francisella novicida Cpf1 D917A/D1255A (A917, E1006, and
A1255 are bolded and underlined)
(SEQ ID NO: 265)
MSIYQEFVNKYSLSKTLRFELIPQGKTLENIKARGLILDDEKRAKDYKKAKQIIDKYHQFFIEEILSSVCIS
EDLLQNYSDVYFKLKKSDDDNLQKDFKSAKDTIKKQISEYIKDSEKFKNLFNQNLIDAKKGQESDLILW
LKQSKDNGIELFKANSDITDIDEALEIIKSFKGWTTYFKGFHENRKNVYSSNDIPTSIIYRIVDDNLPKFLE
NKAKYESLKDKAPEAINYEQIKKDLAELLTFDIDYKTSEVNQRVFSLDEVFEIANFNNYLNQSGITKFNT
IIGGKFVNGENTKRKGINEYINLYSQQINDKTLKKYKMSVLFKQILSDTESKSFVIDKLEDDSDVVTTMQ
SFYEQIAAFKTVEEKSIKETLSLLFDDLKAQKLDLSKIYFKNDKSLTDLSQQVFDDYSVIGTAVLEYITQ
QIAPKNLDNPSKKEQELIAKKTEKAKYLSLETIKLALEEFNKHRDIDKQCRFEEILANFAAIPMIFDEIAQ
NKDNLAQISIKYQNQGKKDLLQASAEDDVKAIKDLLDQTNNLLHKLKIFHISQSEDKANILDKDEHFYL
VFEECYFELANIVPLYNKIRNYITQKPYSDEKFKLNFENSTLANGWDKNKEPDNTAILFIKDDKYYLGV
MNKKNNKIFDDKAIKENKGEGYKKIVYKLLPGANKMLPKVFFSAKSIKFYNPSEDILRIRNHSTHTKNG
SPQKGYEKFEFNIEDCRKFIDFYKQSISKHPEWKDFGFRFSDTQRYNSIDEFYREVENQGYKLTFENISES
YIDSVVNQGKLYLFQIYNKDFSAYSKGRPNLHTLYWKALFDERNLQDVVYKLNGEAELFYRKQSIPKK
ITHPAKEAIANKNKDNPKKESVFEYDLIKDKRFTEDKFFFHCPITINFKSSGANKFNDEINLLLKEKAND
VHILSIARGERHLAYYTLVDGKGNIIKQDTFNIIGNDRMKTNYHDKLAAIEKDRDSARKDWKKINNIKE
MKEGYLSQVVHEIAKLVIEYNAIVVFEDLNFGFKRGRFKVEKQVYQKLEKMLIEKLNYLVFKDNEFDK
TGGVLRAYQLTAPFETFKKMGKQTGIIYYVPAGFTSKICPVTGFVNQLYPKYESVSKSQEFFSKFDKICY
NLDKGYFEFSFDYKNFGDKAAKGKWTIASFGSRLINFRNSDKNHNWDTREVYPTKELEKLLKDYSIEY
GHGECIKAAICGESDKKFFAKLTSVLNTILQMRNSKTGTELDYLISPVADVNGNFFDSRQAPKNMPQDA
AANGAYHIGLKGLMLLGRIKNNQEGKKLNLVIKNEEYFEFVQNRNN
Francisella novicida Cpf1 E1006A/D1255A (D917, A1006, and
A1255 are bolded and underlined)
(SEQ ID NO: 266)
MSIYQEFVNKYSLSKTLRFELIPQGKTLENIKARGLILDDEKRAKDYKKAKQIIDKYHQFFIEEILSSVCIS
EDLLQNYSDVYFKLKKSDDDNLQKDFKSAKDTIKKQISEYIKDSEKFKNLFNQNLIDAKKGQESDLILW
LKQSKDNGIELFKANSDITDIDEALEIIKSFKGWTTYFKGFHENRKNVYSSNDIPTSIIYRIVDDNLPKFLE
NKAKYESLKDKAPEAINYEQIKKDLAELLTFDIDYKTSEVNQRVFSLDEVFEIANFNNYLNQSGITKFNT
IIGGKFVNGENTKRKGINEYINLYSQQINDKTLKKYKMSVLFKQILSDTESKSFVIDKLEDDSDVVTTMQ
SFYEQIAAFKTVEEKSIKETLSLLFDDLKAQKLDLSKIYFKNDKSLTDLSQQVFDDYSVIGTAVLEYITQ
QIAPKNLDNPSKKEQELIAKKTEKAKYLSLETIKLALEEFNKHRDIDKQCRFEEILANFAAIPMIFDEIAQ
NKDNLAQISIKYQNQGKKDLLQASAEDDVKAIKDLLDQTNNLLHKLKIFHISQSEDKANILDKDEHFYL
VFEECYFELANIVPLYNKIRNYITQKPYSDEKFKLNFENSTLANGWDKNKEPDNTAILFIKDDKYYLGV
MNKKNNKIFDDKAIKENKGEGYKKIVYKLLPGANKMLPKVFFSAKSIKFYNPSEDILRIRNHSTHTKNG
SPQKGYEKFEFNIEDCRKFIDFYKQSISKHPEWKDFGFRFSDTQRYNSIDEFYREVENQGYKLTFENISES
YIDSVVNQGKLYLFQIYNKDFSAYSKGRPNLHTLYWKALFDERNLQDVVYKLNGEAELFYRKQSIPKK
ITHPAKEAIANKNKDNPKKESVFEYDLIKDKRFTEDKFFFHCPITINFKSSGANKFNDEINLLLKEKAND
VHILSIDRGERHLAYYTLVDGKGNIIKQDTFNIIGNDRMKTNYHDKLAAIEKDRDSARKDWKKINNIKE
MKEGYLSQVVHEIAKLVIEYNAIVVFADLNFGFKRGRFKVEKQVYQKLEKMLIEKLNYLVFKDNEFDK
TGGVLRAYQLTAPFETFKKMGKQTGIIYYVPAGFTSKICPVTGFVNQLYPKYESVSKSQEFFSKFDKICY
NLDKGYFEFSFDYKNFGDKAAKGKWTIASFGSRLINFRNSDKNHNWDTREVYPTKELEKLLKDYSIEY
GHGECIKAAICGESDKKFFAKLTSVLNTILQMRNSKTGTELDYLISPVADVNGNFFDSRQAPKNMPQDA
AANGAYHIGLKGLMLLGRIKNNQEGKKLNLVIKNEEYFEFVQNRNN
Francisella novicida Cpf1 D917A/E1006A/D1255A (A917,
A1006, and A1255 are bolded and underlined)
(SEQ ID NO: 267)
MSIYQEFVNKYSLSKTLRFELIPQGKTLENIKARGLILDDEKRAKDYKKAKQIIDKYHQFFIEEILSSVCIS
EDLLQNYSDVYFKLKKSDDDNLQKDFKSAKDTIKKQISEYIKDSEKFKNLFNQNLIDAKKGQESDLILW
LKQSKDNGIELFKANSDITDIDEALEIIKSFKGWTTYFKGFHENRKNVYSSNDIPTSIIYRIVDDNLPKFLE
NKAKYESLKDKAPEAINYEQIKKDLAELLTFDIDYKTSEVNQRVFSLDEVFEIANFNNYLNQSGITKFNT
IIGGKFVNGENTKRKGINEYINLYSQQINDKTLKKYKMSVLFKQILSDTESKSFVIDKLEDDSDVVTTMQ
SFYEQIAAFKTVEEKSIKETLSLLFDDLKAQKLDLSKIYFKNDKSLTDLSQQVFDDYSVIGTAVLEYITQ
QIAPKNLDNPSKKEQELIAKKTEKAKYLSLETIKLALEEFNKHRDIDKQCRFEEILANFAAIPMIFDEIAQ
NKDNLAQISIKYQNQGKKDLLQASAEDDVKAIKDLLDQTNNLLHKLKIFHISQSEDKANILDKDEHFYL
VFEECYFELANIVPLYNKIRNYITQKPYSDEKFKLNFENSTLANGWDKNKEPDNTAILFIKDDKYYLGV
MNKKNNKIFDDKAIKENKGEGYKKIVYKLLPGANKMLPKVFFSAKSIKFYNPSEDILRIRNHSTHTKNG
SPQKGYEKFEFNIEDCRKFIDFYKQSISKHPEWKDFGFRFSDTQRYNSIDEFYREVENQGYKLTFENISES
YIDSVVNQGKLYLFQIYNKDFSAYSKGRPNLHTLYWKALFDERNLQDVVYKLNGEAELFYRKQSIPKK
ITHPAKEAIANKNKDNPKKESVFEYDLIKDKRFTEDKFFFHCPITINFKSSGANKFNDEINLLLKEKAND
VHILSIARGERHLAYYTLVDGKGNIIKQDTFNIIGNDRMKTNYHDKLAAIEKDRDSARKDWKKINNIKE
MKEGYLSQVVHEIAKLVIEYNAIVVFADLNFGFKRGRFKVEKQVYQKLEKMLIEKLNYLVFKDNEFDK
TGGVLRAYQLTAPFETFKKMGKQTGIIYYVPAGFTSKICPVTGFVNQLYPKYESVSKSQEFFSKFDKICY
NLDKGYFEFSFDYKNFGDKAAKGKWTIASFGSRLINFRNSDKNHNWDTREVYPTKELEKLLKDYSIEY
GHGECIKAAICGESDKKFFAKLTSVLNTILQMRNSKTGTELDYLISPVADVNGNFFDSRQAPKNMPQDA
AANGAYHIGLKGLMLLGRIKNNQEGKKLNLVIKNEEYFEFVQNRNN

[0125] In some embodiments, the guide nucleotide sequence-programmable DNA binding protein is a Cpf1 protein from a Acidaminococcus species (AsCpf1). Cpf1 proteins form Acidaminococcus species have been described previously and would be apparent to the skilled artisan. Exemplary Acidaminococcus Cpf1 proteins (AsCpf1) include, without limitation, any of the AsCpf1 proteins provided herein.

[0126] Wild-type AsCpf1—Residue R912 is indicated in bold underlining and residues 661-667 are indicated in italics and underlining.

(SEQ ID NO: 2473)
TQFEGFTNLYQVSKTLRFELIPQGKTLKHIQEQGFIEEDKARNDHYKELK
PIIDRIYKTYADQCLQLVQLDWENLSAAIDSYRKEKTEETRNALIELQAT
YRNAIHDYFIGRTDNLTDAINKRHAEIYKGLFKAELFNGKVLKQLGTVTT
TEHENALLRSFDKFTTYFSGFYENRKNVFSAEDISTAIPHRIVQDNFPKF
KENCHIFTRLITAVPSLREHFENVKKAIGIFVSTSIEEVFSFPFYNQLLT
QTQIDLYNQLLGGISREAGTEKIKGLNEVLNLAIQKNDETAHIIASLPHR
FIPLFKQILSDRNTLSFILEEFKSDEEVIQSFCKYKTLLRNENVLETAEA
LFNELNSIDLTHIFISHKKLETISSALCDHWDTLRNALYERRISELTGKI
TKSAKEKVQRSLKHEDINLQEIISAAGKELSEAFKQKTSEILSHAHAALD
QPLPTTMLKKQEEKEILKSQLDSLLGLYHLLDWFAVDESNEVDPEFSARL
TGIKLEMEPSLSFYNKARNYATKKPYSVEKFKLNFQMPTLASGWDVNKEK
NNGAILFVKNGLYYLGIMPKQKGRYKALSFEPTEKTSEGFDKMYYDYFPD
AAKMIPKCSTQLKAVTAHFQTHTTPILLSNNFIEPLEITKEIYDLNNPEK
EPKKFQTAYAKKTGDQKGYREALCKWIDFTRDFLSKYTKTTSIDLSSLRP
SSQYKDLGEYYAELNPLLYHISFQRIAEKEIMDAVETGKLYLFQIYNKDF
AKGHHGKPNLHTLYWTGLFSPENLAKTSIKLNGQAELFYRPKSRMKRMAH
RLGEKMLNKKLKDQKTPIPDTLYQELYDYVNHRLSHDLSDEARALLPNVI
TKEVSHEIIKDRRFTSDKFFFHVPITLNYQAANSPSKFNQRVNAYLKEHP
ETPIIGIDRGERNLIYITVIDSTGKILEQRSLNTIQQFDYQKKLDNREKE
RVAARQAWSVVGTIKDLKQGYLSQVIHEIVDLMIHYQAVVVLENLNFGFK
SKRTGIALKAVYQQFEKMLIDKLNCLVLKDYPAEKVGGVLNPYQLTDQFT
SFAKMGTQSGFLFYVPAPYTSKIDPLTGFVDPFVWKTIKNHESRKHFLEG
FDFLHYDVKTGDFILHFKMNRNLSFQRGLPGFMPAWDIVFEKNETQFDAK
GTPFIAGKRIVPVIENHRFTGRYRDLYPANELIALLEEKGIVFRDGSNIL
PKLLENDDSHAIDTMVALIRSVLQMRNSNAATGEDYINSPVRDLNGVCFD
SRFQNPEWPMDADANGAYHIALKGQLLLNHLKESKDLKLQNGISNQDWLA
YIQELRN

[0127] AsCpf1(R912A)—Residue A912 is indicated in bold underlining and residues 661-667 are indicated in italics and underlining.

(SEQ ID NO: 2474)
TQFEGFTNLYQVSKTLRFELIPQGKTLKHIQEQGFIEEDKARNDHYKELK
PIIDRIYKTYADQCLQLVQLDWENLSAAIDSYRKEKTEETRNALIELQAT
YRNAIHDYFIGRTDNLTDAINKRHAEIYKGLFKAELFNGKVLKQLGTVTT
TEHENALLRSFDKFTTYFSGFYENRKNVFSAEDISTAIPHRIVQDNFPKF
KENCHIFTRLITAVPSLREHFENVKKAIGIFVSTSIEEVFSFPFYNQLLT
QTQIDLYNQLLGGISREAGTEKIKGLNEVLNLAIQKNDETAHIIASLPHR
FIPLFKQILSDRNTLSFILEEFKSDEEVIQSFCKYKTLLRNENVLETAEA
LFNELNSIDLTHIFISHKKLETISSALCDHWDTLRNALYERRISELTGKI
TKSAKEKVQRSLKHEDINLQEIISAAGKELSEAFKQKTSEILSHAHAALD
QPLPTTMLKKQEEKEILKSQLDSLLGLYHLLDWFAVDESNEVDPEFSARL
TGIKLEMEPSLSFYNKARNYATKKPYSVEKFKLNFQMPTLASGWDVNKEK
NNGAILFVKNGLYYLGIMPKQKGRYKALSFEPTEKTSEGFDKMYYDYFPD
AAKMIPKCSTQLKAVTAHFQTHTTPILLSNNFIEPLEITKEIYDLNNPEK
EPKKFQTAYAKKTGDQKGYREALCKWIDFTRDFLSKYTKTTSIDLSSLRP
SSQYKDLGEYYAELNPLLYHISFQRIAEKEIMDAVETGKLYLFQIYNKDF
AKGHHGKPNLHTLYWTGLFSPENLAKTSIKLNGQAELFYRPKSRMKRMAH
RLGEKMLNKKLKDQKTPIPDTLYQELYDYVNHRLSHDLSDEARALLPNVI
TKEVSHEIIKDRRFTSDKFFFHVPITLNYQAANSPSKFNQRVNAYLKEHP
ETPIIGIDRGEANLIYITVIDSTGKILEQRSLNTIQQFDYQKKLDNREKE
RVAARQAWSVVGTIKDLKQGYLSQVIHEIVDLMIHYQAVVVLENLNFGFK
SKRTGIALKAVYQQFEKMLIDKLNCLVLKDYPAEKVGGVLNPYQLTDQFT
SFAKMGTQSGFLFYVPAPYTSKIDPLTGFVDPFVWKTIKNHESRKHFLEG
FDFLHYDVKTGDFILHFKMNRNLSFQRGLPGFMPAWDIVFEKNETQFDAK
GTPFIAGKRIVPVIENHRFTGRYRDLYPANELIALLEEKGIVFRDGSNIL
PKLLENDDSHAIDTMVALIRSVLQMRNSNAATGEDYINSPVRDLNGVCFD
SRFQNPEWPMDADANGAYHIALKGQLLLNHLKESKDLKLQNGISNQDWLA
YIQELRN

[0128] In some embodiments, the nucleic acid programmable DNA binding protein is a Cpf1 protein from a Lachnospiraceae species (LbCpf1). Cpf1 proteins form Lachnospiraceae species have been described previously have been described previously and would be apparent to the skilled artisan. Exemplary Lachnospiraceae Cpf1 proteins (LbCpf1) include, without limitation, any of the LbCpf1 proteins provided herein.

Wild-type LbCpf1
(SEQ ID NO: 2475)
MSKLEKFTNCYSLSKTLRFKAIPVGKTQENIDNKRLLVEDEKRAEDYKGVKKLLDRYYLSFINDVEHSI
KLKNLNNYISLFRKKTRTEKENKELENLEINLRKEIAKAFKGNEGYKSLFKKDIIETILPEFLDDKDEIAL
VNSFNGFTTAFTGFFDNRENMFSEEAKSTSIAFRCINENLTRYISNMDIFEKVDAIFDKHEVQEIKEKILN
SDYDVEDFFEGEFFNFVLTQEGIDVYNAIIGGFVTESGEKIKGENEYINLYNQKTKQKLPKFKPLYKQVL
SDRESLSFYGEGYTSDEEVLEVFRNTLNKNSEIFSSIKKLEKLFKNFDEYSSAGIFVKNGPAISTISKDIFG
EWNVIRDKWNAEYDDIHLKKKAVVTEKYEDDRRKSFKKIGSFSLEQLQEYADADESVVEKLKEIIIQK
VDEIYKVYGSSEKLFDADFVLEKSLKKNDAVVAIMKDLLDSVKSFENYIKAFFGEGKETNRDESFYGD
FVLAYDILLKVDHIYDAIRNYVTQKPYSKDKFKLYFQNPQFMGGWDKDKETDYRATILRYGSKYYLAI
MDKKYAKCLQKIDKDDVNGNYEKINYKLLPGPNKMLPKVFFSKKWMAYYNPSEDIQKIYKNGTFKK
GDMFNLNDCHKLIDFFKDSISRYPKWSNAYDFNFSETEKYKDIAGFYREVEEQGYKVSFESASKKEVD
KLVEEGKLYMFQIYNKDFSDKSHGTPNLHTMYFKLLFDENNHGQIRLSGGAELFMRRASLKKEELVVH
PANSPIANKNPDNPKKTTTLSYDVYKDKRFSEDQYELHIPIAINKCPKNIFKINTEVRVLLKHDDNPYVI
GIDRGERNLLYIVVVDGKGNIVEQYSLNEIINNFNGIRIKTDYHSLLDKKEKERFEARQNWTSIENIKELK
AGYISQVVHKICELVEKYDAVIALEDLNSGFKNSRVKVEKQVYQKFEKMLIDKLNYMVDKKSNPCAT
GGALKGYQITNKFESFKSMSTQNGFIFYIPAWLTSKIDPSTGFVNLLKTKYTSIADSKKFISSFDRIMYVP
EEDLFEFALDYKNFSRTDADYIKKWKLYSYGNRIRIFRNPKKNNVFDWEEVCLTSAYKELFNKYGINY
QQGDIRALLCEQSDKAFYSSFMALMSLMLQMRNSITGRTDVDFLISPVKNSDGIFYDSRNYEAQENAIL
PKNADANGAYNIARKVLWAIGQFKKAEDEKLDKVKIAISNKEWLEYAQTSVKH
LbCpf1 (R836A)
(SEQ ID NO: 2476)
MSKLEKFTNCYSLSKTLRFKAIPVGKTQENIDNKRLLVEDEKRAEDYKGVKKLLDRYYLSFINDVLHSI
KLKNLNNYISLFRKKTRTEKENKELENLEINLRKEIAKAFKGNEGYKSLFKKDIIETILPEFLDDKDEIAL
VNSFNGFTTAFTGFFDNRENMFSEEAKSTSIAFRCINENLTRYISNMDIFEKVDAIFDKHEVQEIKEKILN
SDYDVEDFFEGEFFNFVLTQEGIDVYNAIIGGFVTESGEKIKGLNEYINLYNQKTKQKLPKFKPLYKQVL
SDRESLSFYGEGYTSDEEVLEVFRNTLNKNSEIFSSIKKLEKLFKNFDEYSSAGIFVKNGPAISTISKDIFG
EWNVIRDKWNAEYDDIHLKKKAVVTEKYEDDRRKSFKKIGSFSLEQLQEYADADLSVVEKLKEIIIQK
VDEIYKVYGSSEKLFDADFVLEKSLKKNDAVVAIMKDLLDSVKSFENYIKAFFGEGKETNRDESFYGD
FVLAYDILLKVDHIYDAIRNYVTQKPYSKDKFKLYFQNPQFMGGWDKDKETDYRATILRYGSKYYLAI
MDKKYAKCLQKIDKDDVNGNYEKINYKLLPGPNKMLPKVFFSKKWMAYYNPSEDIQKIYKNGTFKK
GDMFNLNDCHKLIDFFKDSISRYPKWSNAYDFNFSETEKYKDIAGFYREVEEQGYKVSFESASKKEVD
KLVEEGKLYMFQIYNKDFSDKSHGTPNLHTMYFKLLFDENNHGQIRLSGGAELFMRRASLKKEELVVH
PANSPIANKNPDNPKKTTTLSYDVYKDKRFSEDQYELHIPIAINKCPKNIFKINTEVRVLLKHDDNPYVI
GIDRGEANLLYIVVVDGKGNIVEQYSLNEIINNFNGIRIKTDYHSLLDKKEKERFEARQNWTSIENIKEL
KAGYISQVVHKICELVEKYDAVIALEDENSGFKNSRVKVEKQVYQKFEKMLIDKLNYMVDKKSNPCA
TGGALKGYQITNKFESFKSMSTQNGFIFYIPAWLTSKIDPSTGFVNLLKTKYTSIADSKKFISSFDRIMYV
PEEDLFEFALDYKNFSRTDADYIKKWKLYSYGNRIRIFRNPKKNNVFDWEEVCLTSAYKELFNKYGIN
YQQGDIRALLCEQSDKAFYSSFMALMSLMLQMRNSITGRTDVDFLISPVKNSDGIFYDSRNYEAQENAI
LPKNADANGAYNIARKVLWAIGQFKKAEDEKLDKVKIAISNKEWLEYAQTSVKH
LbCpf1 (R1138A)
(SEQ ID NO: 2477)
MSKLEKFTNCYSLSKTERFKAIPVGKTQENIDNKRLLVEDEKRAEDYKGVKKLLDRYYLSFINDVLHSI
KLKNLNNYISLFRKKTRTEKENKELENLEINERKEIAKAFKGNEGYKSLFKKDIIETILPEFLDDKDEIAL
VNSFNGFTTAFTGFFDNRENMFSEEAKSTSIAFRCINENLTRYISNMDIFEKVDAIFDKHEVQEIKEKILN
SDYDVEDFFEGEFFNFVLTQEGIDVYNAIIGGFVTESGEKIKGLNEYINLYNQKTKQKLPKFKPLYKQVL
SDRESLSFYGEGYTSDEEVLEVFRNTLNKNSEIFSSIKKLEKLFKNFDEYSSAGIFVKNGPAISTISKDIFG
EWNVIRDKWNAEYDDIHLKKKAVVTEKYEDDRRKSFKKIGSFSLEQLQEYADADLSVVEKLKEIIIQK
VDEIYKVYGSSEKLFDADFVLEKSLKKNDAVVAIMKDLLDSVKSFENYIKAFFGEGKETNRDESFYGD
FVLAYDILLKVDHIYDAIRNYVTQKPYSKDKFKLYFQNPQFMGGWDKDKETDYRATILRYGSKYYLAI
MDKKYAKCLQKIDKDDVNGNYEKINYKLLPGPNKMLPKVFFSKKWMAYYNPSEDIQKIYKNGTFKK
GDMFNLNDCHKLIDFFKDSISRYPKWSNAYDFNFSETEKYKDIAGFYREVEEQGYKVSFESASKKEVD
KLVEEGKLYMFQIYNKDFSDKSHGTPNLHTMYFKLLFDENNHGQIRLSGGAELFMRRASLKKEELVVH
PANSPIANKNPDNPKKTTTLSYDVYKDKRFSEDQYELHIPIAINKCPKNIFKINTEVRVLLKHDDNPYVI
GIDRGERNLLYIVVVDGKGNIVEQYSLNEIINNFNGIRIKTDYHSLLDKKEKERFEARQNWTSIENIKELK
AGYISQVVHKICELVEKYDAVIALEDLNSGFKNSRVKVEKQVYQKFEKMLIDKLNYMVDKKSNPCAT
GGALKGYQITNKFESFKSMSTQNGFIFYIPAWLTSKIDPSTGFVNLLKTKYTSIADSKKFISSFDRIMYVP
EEDLFEFALDYKNFSRTDADYIKKWKLYSYGNRIRIFRNPKKNNVFDWEEVCLTSAYKELFNKYGINY
QQGDIRALLCEQSDKAFYSSFMALMSLMLQMANSITGRTDVDFLISPVKNSDGIFYDSRNYEAQENAIL
PKNADANGAYNIARKVLWAIGQFKKAEDEKLDKVKIAISNKEWLEYAQTSVKH

[0129] In some embodiments, the Cpf1 protein is a crippled Cpf1 protein. As used herein a “crippled Cpf1” protein is a Cpf1 protein having diminished nuclease activity as compared to a wild-type Cpf1 protein. In some embodiments, the crippled Cpf1 protein preferentially cuts the target strand more efficiently than the non-target strand. For example, the Cpf1 protein preferentially cuts the strand of a duplexed nucleic acid molecule in which a nucleotide to be edited resides. In some embodiments, the crippled Cpf1 protein preferentially cuts the non-target strand more efficiently than the target strand. For example, the Cpf1 protein preferentially cuts the strand of a duplexed nucleic acid molecule in which a nucleotide to be edited does not reside. In some embodiments, the crippled Cpf1 protein preferentially cuts the target strand at least 5% more efficiently than it cuts the non-target strand. In some embodiments, the crippled Cpf1 protein preferentially cuts the target strand at least 5%, 10%, 15%, 20%, 25%, 30%, 35%, 40%, 50%, 60%, 70%, 80%, 90%, or at least 100% more efficiently than it cuts the non-target strand.

[0130] In some embodiments, a crippled Cpf1 protein is a non-naturally occurring Cpf1 protein. In some embodiments, the crippled Cpf1 protein comprises one or more mutations relative to a wild-type Cpf1 protein. In some embodiments, the crippled Cpf1 protein comprises 1, 2, 3, 4, 5, 6, 7, 8, 9, 10, 11, 12, 13, 14, 15, 16, 17, 18, 19, or 20 mutations relative to a wild-type Cpf1 protein. In some embodiments, the crippled Cpf1 protein comprises an R836A mutation mutation as set forth in SEQ ID NO: 763, or in a corresponding amino acid in another Cpf1 protein. It should be appreciated that a Cpf1 comprising a homologous residue (e.g., a corresponding amino acid) to R836A of SEQ ID NO: 763 could also be mutated to achieve similar results. In some embodiments, the crippled Cpf1 protein comprises a R1138A mutation as set forth in SEQ ID NO: 763, or in a corresponding amino acid in another Cpf1 protein. In some embodiments, the crippled Cpf1 protein comprises an R912A mutation mutation as set forth in SEQ ID NO: 762, or in a corresponding amino acid in another Cpf1 protein. Without wishing to be bound by any particular theory, residue R838 of SEQ ID NO: 763 (LbCpf1) and residue R912 of SEQ ID NO: 762 (AsCpf1) are examples of corresponding (e.g., homologous) residues. For example, a portion of the alignment between SEQ ID NO: 762 and 763 shows that R912 and R838 are corresponding residues.

[0131] In some embodiments, any of the Cpf1 proteins provided herein comprises one or more amino acid deletions. In some embodiments, any of the Cpf1 proteins provided herein comprises 1, 2, 3, 4, 5, 6, 7, 8, 9, 10, 11, 12, 13, 14, 15, 16, 17, 18, 19, or 20 amino acid deletions. Without wishing to be bound by any particular theory, there is a helical region in Cpf1, which includes residues 661-667 of AsCpf1 (SEQ ID NO: 762), that may obstruct the function of a deaminase (e.g., APOBEC) that is fused to the Cpf1. This region comprises the amino acid sequence KKTGDQK. Accordingly, aspects of the disclosure provide Cpf1 proteins comprising mutations (e.g., deletions) that disrupt this helical region in Cpf1. In some embodiments, the Cpf1 protein comprises one or more deletions of the following residues in SEQ ID NO: 762, or one or more corresponding deletions in another Cpf1 protein: K661, K662, T663, G664, D665, Q666, and K667. In some embodiments, the Cpf1 protein comprises a T663 and a D665 deletion in SEQ ID NO: 762, or corresponding deletions in another Cpf1 protein. In some embodiments, the Cpf1 protein comprises a K662,T663, D665, and Q666 deletion in SEQ ID NO: 762, or corresponding deletions in another Cpf1 protein. In some embodiments, the Cpf1 protein comprises a K661, K662, T663, D665, Q666 and K667 deletion in SEQ ID NO: 762, or corresponding deletions in another Cpf1 protein.

AsCpf1 (deleted T663 and D665)
(SEQ ID NO: 2478)
TQFEGFTNLYQVSKTLRFELIPQGKTLKHIQEQGFIEEDKARNDHYKELKPIIDRIYKTYADQCLQLVQL
DWENLSAAIDSYRKEKTEETRNALIELQATYRNAIHDYFIGRTDNLTDAINKRHAEIYKGLFKAELFNG
KVLKQLGTVTTTEHENALLRSFDKFTTYFSGFYENRKNVFSAEDISTAIPHRIVQDNFPKFKENCHIFTRL
ITAVPSLREHFENVKKAIGIFVSTSIEEVFSFPFYNQLLTQTQIDLYNQLLGGISREAGTEKIKGLNEVLNL
AIQKNDETAHIIASLPHRFIPLFKQILSDRNTLSFILEEFKSDEEVIQSFCKYKTLLRNENVLETAEALFNEL
NSIDLTHIFISHKKLETISSALCDHWDTLRNALYERRISELTGKITKSAKEKVQRSLKHEDINLQEIISAAG
KELSEAFKQKTSEILSHAHAALDQPLPTTMLKKQEEKEILKSQLDSLLGLYHLLDWFAVDESNEVDPEF
SARLTGIKLEMEPSLSFYNKARNYATKKPYSVEKFKLNFQMPTLASGWDVNKEKNNGAILFVKNGLY
YLGIMPKQKGRYKALSFEPTEKTSEGFDKMYYDYFPDAAKMIPKCSTQLKAVTAHFQTHTTPILLSNNF
IEPLEITKEIYDLNNPEKEPKKFQTAYAKKGQKGYREALCKWIDFTRDFLSKYTKTTSIDLSSLRPSSQY
KDLGEYYAELNPLLYHISFQRIAEKEIMDAVETGKLYLFQIYNKDFAKGHHGKPNLHTLYWTGLFSPEN
LAKTSIKLNGQAELFYRPKSRMKRMAHRLGEKMLNKKLKDQKTPIPDTLYQELYDYVNHRLSHDLSD
EARALLPNVITKEVSHEIIKDRRFTSDKFFFHVPITLNYQAANSPSKFNQRVNAYLKEHPETPIIGIDRGER
NLIYITVIDSTGKILEQRSLNTIQQFDYQKKLDNREKERVAARQAWSVVGTIKDLKQGYLSQVIHEIVDL
MIHYQAVVVLENLNFGFKSKRTGIALKAVYQQFEKMLIDKLNCLVLKDYPAEKVGGVLNPYQLTDQF
TSFAKMGTQSGFLFYVPAPYTSKIDPLTGFVDPFVWKTIKNHESRKHFLEGFDFLHYDVKTGDFILHFK
MNRNLSFQRGLPGFMPAWDIVFEKNETQFDAKGTPFIAGKRIVPVIENHRFTGRYRDLYPANELIALLE
EKGIVFRDGSNILPKLLENDDSHAIDTMVALIRSVLQMRNSNAATGEDYINSPVRDLNGVCFDSRFQNP
EWPMDADANGAYHIALKGQLLLNHLKESKDLKLQNGISNQDWLAYIQELRN
AsCpf1 (deleted K662, T663, D665, and Q666)
(SEQ ID NO: 2479)
TQFEGFTNLYQVSKTLRFELIPQGKTLKHIQEQGFIEEDKARNDHYKELKPIIDRIYKTYADQCLQLVQL
DWENLSAAIDSYRKEKTEETRNALIELQATYRNAIHDYFIGRTDNLTDAINKRHAEIYKGLFKAELFNG
KVLKQLGTVTTTEHENALLRSFDKFTTYFSGFYENRKNVFSAEDISTAIPHRIVQDNFPKFKENCHIFTRL
ITAVPSLREHFENVKKAIGIFVSTSIEEVFSFPFYNQLLTQTQIDLYNQLLGGISREAGTEKIKGLNEVLNL
AIQKNDETAHIIASLPHRFIPLFKQILSDRNTLSFILEEFKSDEEVIQSFCKYKTLLRNENVLETAEALFNEL
NSIDLTHIFISHKKLETISSALCDHWDTLRNALYERRISELTGKITKSAKEKVQRSLKHEDINLQEIISAAG
KELSEAFKQKTSEILSHAHAALDQPLPTTMLKKQEEKEILKSQLDSLLGLYHLLDWFAVDESNEVDPEF
SARLTGIKLEMEPSLSFYNKARNYATKKPYSVEKFKLNFQMPTLASGWDVNKEKNNGAILFVKNGLY
YLGIMPKQKGRYKALSFEPTEKTSEGFDKMYYDYFPDAAKMIPKCSTQLKAVTAHFQTHTTPILLSNNF
IEPLEITKEIYDLNNPEKEPKKFQTAYAKGKGYREALCKWIDFTRDFLSKYTKTTSIDLSSLRPSSQYKDL
GEYYAELNPLLYHISFQRIAEKEIMDAVETGKLYLFQIYNKDFAKGHHGKPNLHTLYWTGLFSPENLAK
TSIKLNGQAELFYRPKSRMKRMAHRLGEKMLNKKLKDQKTPIPDTLYQELYDYVNHRLSHDLSDEAR
ALLPNVITKEVSHEIIKDRRFTSDKFFFHVPITLNYQAANSPSKFNQRVNAYLKEHPETPIIGIDRGERNLI
YITVIDSTGKILEQRSLNTIQQFDYQKKLDNREKERVAARQAWSVVGTIKDLKQGYLSQVIHEIVDLMI
HYQAVVVLENLNFGFKSKRTGIAEKAVYQQFEKMLIDKLNCLVLKDYPAEKVGGVLNPYQLTDQFTS
FAKMGTQSGFLFYVPAPYTSKIDPLTGFVDPFVWKTIKNHESRKHFLEGFDFLHYDVKTGDFILHFKMN
RNLSFQRGLPGFMPAWDIVFEKNETQFDAKGTPFIAGKRIVPVIENHRFTGRYRDLYPANELIALLEEKG
IVFRDGSNILPKLLENDDSHAIDTMVALIRSVLQMRNSNAATGEDYINSPVRDLNGVCFDSRFQNPEWP
MDADANGAYHIALKGQLLLNHLKESKDLKLQNGISNQDWLAYIQELRN
AsCpf1 (deleted K661, K662, T663,D665, Q666, and K667)
(SEQ ID NO: 2480)
TQFEGFTNLYQVSKTLRFELIPQGKTLKHIQEQGFIEEDKARNDHYKELKPIIDRIYKTYADQCLQLVQL
DWENLSAAIDSYRKEKTEETRNALIEEQATYRNAIHDYFIGRTDNLTDAINKRHAEIYKGLFKAELFNG
KVLKQLGTVTTTEHENALLRSFDKFTTYFSGFYENRKNVFSAEDISTAIPHRIVQDNFPKFKENCHIFTRL
ITAVPSLREHFENVKKAIGIFVSTSIEEVFSFPFYNQLLTQTQIDLYNQLLGGISREAGTEKIKGLNEVLNL
AIQKNDETAHIIASLPHRFIPLFKQILSDRNTLSFILEEFKSDEEVIQSFCKYKTLLRNENVLETAEALFNEL
NSIDLTHIFISHKKLETISSALCDHWDTLRNALYERRISELTGKITKSAKEKVQRSLKHEDINLQEIISAAG
KELSEAFKQKTSEILSHAHAALDQPLPTTMLKKQEEKEILKSQLDSLLGLYHLLDWFAVDESNEVDPEF
SARLTGIKLEMEPSLSFYNKARNYATKKPYSVEKFKLNFQMPTLASGWDVNKEKNNGAILFVKNGLY
YLGIMPKQKGRYKALSFEPTEKTSEGFDKMYYDYFPDAAKMIPKCSTQLKAVTAHFQTHTTPILLSNNF
IEPLEITKEIYDLNNPEKEPKKFQTAYAGGYREALCKWIDFTRDFLSKYTKTTSIDLSSLRPSSQYKDLGE
YYAELNPLLYHISFQRIAEKEIMDAVETGKLYLFQIYNKDFAKGHHGKPNLHTLYWTGLFSPENLAKTS
IKLNGQAELFYRPKSRMKRMAHRLGEKMLNKKLKDQKTPIPDTLYQELYDYVNHRLSHDLSDEARAL
LPNVITKEVSHEIIKDRRFTSDKFFFHVPITLNYQAANSPSKFNQRVNAYLKEHPETPIIGIDRGERNLIYIT
VIDSTGKILEQRSLNTIQQFDYQKKLDNREKERVAARQAWSVVGTIKDLKQGYLSQVIHEIVDLMIHYQ
AVVVLENLNFGFKSKRTGIAEKAVYQQFEKMLIDKLNCLVLKDYPAEKVGGVLNPYQLTDQFTSFAK
MGTQSGFLFYVPAPYTSKIDPLTGFVDPFVWKTIKNHESRKHFLEGFDFLHYDVKTGDFILHFKMNRNL
SFQRGLPGFMPAWDIVFEKNETQFDAKGTPFIAGKRIVPVIENHRFTGRYRDLYPANELIALLEEKGIVF
RDGSNILPKLLENDDSHAIDTMVALIRSVLQMRNSNAATGEDYINSPVRDLNGVCFDSRFQNPEWPMD
ADANGAYHIALKGQLLLNHLKESKDLKLQNGISNQDWLAYIQELRN

[0132] In some embodiments, the guide nucleotide sequence-programmable DNA-binding protein domain of the present disclosure has no requirements for a PAM sequence. One example of such a guide nucleotide sequence-programmable DNA-binding protein may be an Argonaute protein from Natronobacterium gregoryi (NgAgo). NgAgo is a ssDNA-guided endonuclease. NgAgo binds 5′ phosphorylated ssDNA of ˜24 nucleotides (gDNA) to guide it to its target site and will make DNA double-strand breaks at gDNA site. In contrast to Cas9, the NgAgo-gDNA system does not require a protospacer-adjacent motif (PAM). Using a nuclease inactive NgAgo (dNgAgo) can greatly expand the bases or codons that may be targeted. The characterization and use of NgAgo have been described in Gao et al., Nat Biotechnol. Epub 2016 May 2. PubMed PMID: 27136078; Swarts et al., Nature. 507(7491) (2014):258-61; and Swarts et al., Nucleic Acids Res. 43(10) (2015):5120-9, each of which are incorporated herein by reference. The sequence of Natronobacterium gregoryi Argonaute is provided in SEQ ID NO: 270.

Wild type Natronobacterium gregoryi Argonaute
(SEQ ID NO: 270)
MTVIDLDSTTTADELTSGHTYDISVTLTGVYDNTDEQHPRMSLAFEQDNG
ERRYITLWKNTTPKDVFTYDYATGSTYIFTNIDYEVKDGYENLTATYQTT
VENATAQEVGTTDEDETFAGGEPLDHHLDDALNETPDDAETESDSGHVMT
SFASRDQLPEWTLHTYTLTATDGAKTDTEYARRTLAYTVRQELYTDHDAA
PVATDGLMLLTPEPLGETPLDLDCGVRVEADETRTLDYTTAKDRLLAREL
VEEGLKRSLWDDYLVRGIDEVLSKEPVLTCDEFDLHERYDLSVEVGHSGR
AYLHINFRHRFVPKLTLADIDDDNIYPGLRVKTTYRPRRGHIVWGLRDEC
ATDSLNTLGNQSVVAYHRNNQTPINTDLLDAIEAADRRVVETRRQGHGDD
AVSFPQELLAVEPNTHQIKQFASDGFHQQARSKTRLSASRCSEKAQAFAE
RLDPVRLNGSTVEFSSEFFTGNNEQQLRLLYENGESVLTFRDGARGAHPD
ETFSKGIVNPPESFEVAVVLPEQQADTCKAQWDTMADLLNQAGAPPTRSE
TVQYDAFSSPESISLNVAGAIDPSEVDAAFVVLPPDQEGFADLASPTETY
DELKKALANMGIYSQMAYFDRFRDAKIFYTRNVALGLLAAAGGVAFTTEH
AMPGDADMFIGIDVSRSYPEDGASGQINIAATATAVYKDGTILGHSSTRP
QLGEKLQSTDVRDIMKNAILGYQQVTGESPTHIVIHRDGFMNEDLDPATE
FLNEQGVEYDIVEIRKQPQTRLLAVSDVQYDTPVKSIAAINQNEPRATVA
TFGAPEYLATRDGGGLPRPIQIERVAGETDIETLTRQVYLLSQSHIQVHN
STARLPITTAYADQASTHATKGYLVQTGAFESNVGFL

[0133] Also provided herein are Cas9 variants that have relaxed PAM requirements (PAMless Cas9). PAMless Cas9 exhibits an increased activity on a target sequence that does not include a canonical PAM (e.g., NGG) at its 3′-end as compared to Streptococcus pyogenes Cas9 as provided by SEQ ID NO: 1, e.g., increased activity by at least 5-fold, at least 10-fold, at least 50-fold, at least 100-fold, at least 500-fold, at least 1,000-fold, at least 5,000-fold, at least 10,000-fold, at least 50,000-fold, at least 100,000-fold, at least 500,000-fold, or at least 1,000,000-fold. Such Cas9 variants that have relaxed PAM requirements are described in U.S. Provisional applications, U.S. Ser. No. 62/245,828, 62/279,346, 62/311,763, 62/322,178, and 62/357,332, each of which is incorporated herein by reference. In some embodiments, the dCas9 or Cas9 nickase useful in the present disclosure may further comprise mutations that relax the PAM requirements, e.g., mutations that correspond to A262T, K294R, S409I, E480K, E543D, M694I, or E1219V in SEQ ID NO: 1.

[0134] Other non-limiting, exemplary Cas9 variants (including dCas9, Cas9 nickase, and Cas9 variants with alternative PAM requirements) suitable for use in the nucleobase editors useful in the present disclosure and their respective sequences are provided below.

VRER-nCas9 (D10A/D1135V/G1218R/R1335E/T1337R) S. pyogenes Cas9 Nickase
(SEQ ID NO: 2426)
MDKKYSIGLAIGTNSVGWAVITDEYKVPSKKFKVLGNTDRHSIKKNLIGALLFDSGETAEATRLKRTAR
RRYTRRKNRICYLQEIFSNEMAKVDDSFFHRLEESFLVEEDKKHERHPIFGNIVDEVAYHEKYPTIYHLR
KKLVDSTDKADLRLIYLALAHMIKFRGHFLIEGDLNPDNSDVDKLFIQLVQTYNQLFEENPINASGVDA
KAILSARLSKSRRLENLIAQLPGEKKNGLFGNLIALSLGLTPNFKSNFDLAEDAKLQLSKDTYDDDLDN
LLAQIGDQYADLFLAAKNLSDAILLSDILRVNTEITKAPLSASMIKRYDEHHQDLTLLKALVRQQLPEK
YKEIFFDQSKNGYAGYIDGGASQLEFYKFIKPILEKMDGTEELLVKLNREDLLRKQRTFDNGSIPHQIHL
GELHAILRRQEDFYPFLKDNREKIEKILTFRIPYYVGPLARGNSRFAWMTRKSEETITPWNFEEVVDKGA
SAQSFIERMTNFDKNLPNEKVLPKHSLLYEYFTVYNELTKVKYVTEGMRKPAFLSGEQKKAIVDLLFK
TNRKVTVKQLKEDYFKKIECFDSVEISGVEDRFNASLGTYHDLLKIIKDKDFLDNEENEDILEDIVLTLT
LFEDREMIEERLKTYAHLFDDKVMKQLKRRRYTGWGRLSRKLINGIRDKQSGKTILDFLKSDGFANRN
FMQLIHDDSLTFKEDIQKAQVSGQGDSLHEHIANLAGSPAIKKGILQTVKVVDELVKVMGRHKPENIVI
EMARENQTTQKGQKNSRERMKRIEEGIKELGSQILKEHPVENTQLQNEKLYLYYLQNGRDMYVDQEL
DINRLSDYDVDHIVPQSFLKDDSIDNKVLTRSDKNRGKSDNVPSEEVVKKMKNYWRQLLNAKLITQRK
FDNLTKAERGGLSELDKAGFIKRQLVETRQITKHVAQILDSRMNTKYDENDKLIREVKVITLKSKLVSD
FRKDFQFYKVREINNYHHAHDAYLNAVVGTALIKKYPKLESEFVYGDYKVYDVRKMIAKSEQEIGKA
TAKYFFYSNIMNFFKTEITLANGEIRKRPLIETNGETGEIVWDKGRDFATVRKVLSMPQVNIVKKTEVQ
TGGFSKESILPKRNSDKLIARKKDWDPKKYGGFVSPTVAYSVLVVAKVEKGKSKKLKSVKELLGITIME
RSSFEKNPIDFLEAKGYKEVKKDLIIKLPKYSLFELENGRKRMLASARELQKGNELALPSKYVNFLYLA
SHYEKLKGSPEDNEQKQLFVEQHKHYLDEIIEQISEFSKRVILADANLDKVLSAYNKHRDKPIREQAENI
IHLFTLTNLGAPAAFKYFDTTIDRKEYRSTKEVLDATLIHQSITGLYETRIDLSQLGGD
(single underline: HNH domain; double underline: RuvC domain)
VQR-nCas9 (D10A/D1135V/R1335Q/T1337R) S. pyogenes Cas9 Nickase
(SEQ ID NO: 2427)
MDKKYSIGLAIGTNSVGWAVITDEYKVPSKKFKVLGNTDRHSIKKNLIGALLFDSGETAEATRLKRTAR
RRYTRRKNRICYLQEIFSNEMAKVDDSFFHRLEESFLVEEDKKHERHPIFGNIVDEVAYHEKYPTIYHLR
KKLVDSTDKADLRLIYLALAHMIKFRGHFLIEGDLNPDNSDVDKLFIQLVQTYNQLFEENPINASGVDA
KAILSARLSKSRRLENLIAQLPGEKKNGLFGNLIALSLGLTPNFKSNFDLAEDAKLQLSKDTYDDDLDN
LLAQIGDQYADLFLAAKNLSDAILLSDILRVNTEITKAPLSASMIKRYDEHHQDLTLLKALVRQQLPEK
YKEIFFDQSKNGYAGYIDGGASQLEFYKFIKPILEKMDGTEELLVKLNREDLLRKQRTFDNGSIPHQIHL
GELHAILRRQEDFYPFLKDNREKIEKILTFRIPYYVGPLARGNSRFAWMTRKSEETITPWNFEEVVDKGA
SAQSFIERMTNFDKNLPNEKVLPKHSLLYEYFTVYNELTKVKYVTEGMRKPAFLSGEQKKAIVDLLFK
TNRKVTVKQLKEDYFKKIECFDSVEISGVEDRFNASLGTYHDLLKIIKDKDFLDNEENEDILEDIVLTLT
LFEDREMIEERLKTYAHLFDDKVMKQLKRRRYTGWGRLSRKLINGIRDKQSGKTILDFLKSDGFANRN
FMQLIHDDSLTFKEDIQKAQVSGQGDSLHEHIANLAGSPAIKKGILQTVKVVDELVKVMGRHKPENIVI
EMARENQTTQKGQKNSRERMKRIEEGIKELGSQILKEHPVENTQLQNEKLYLYYLQNGRDMYVDQEL
DINRLSDYDVDHIVPQSFLKDDSIDNKVLTRSDKNRGKSDNVPSEEVVKKMKNYWRQLLNAKLITQRK
FDNLTKAERGGLSELDKAGFIKRQLVETRQITKHVAQILDSRMNTKYDENDKLIREVKVITLKSKLVSD
FRKDFQFYKVREINNYHHAHDAYLNAVVGTALIKKYPKLESEFVYGDYKVYDVRKMIAKSEQEIGKA
TAKYFFYSNIMNFFKTEITLANGEIRKRPLIETNGETGEIVWDKGRDFATVRKVLSMPQVNIVKKTEVQ
TGGFSKESILPKRNSDKLIARKKDWDPKKYGGFVSPTVAYSVLVVAKVEKGKSKKLKSVKELLGITIME
RSSFEKNPIDFLEAKGYKEVKKDLIIKLPKYSLFELENGRKRMLASAGELQKGNELALPSKYVNFLYLA
SHYEKLKGSPEDNEQKQLFVEQHKHYLDEIIEQISEFSKRVILADANLDKVLSAYNKHRDKPIREQAENI
IHLFTLTNLGAPAAFKYFDTTIDRKQYRSTKEVLDATLIHQSITGLYETRIDLSQLGGD
(single underline: HNH domain; double underline: RuvC domain)
EQR-nCas9 (D10A/D1135E/R1335Q/T1337R) S. pyogenes Cas9 Nickase
(SEQ ID NO: 2428)
MDKKYSIGLAIGTNSVGWAVITDEYKVPSKKFKVLGNTDRHSIKKNLIGALLFDSGETAEATRLKRTAR
RRYTRRKNRICYLQEIFSNEMAKVDDSFFHRLEESFLVEEDKKHERHPIFGNIVDEVAYHEKYPTIYHLR
KKLVDSTDKADLRLIYLALAHMIKFRGHFLIEGDLNPDNSDVDKLFIQLVQTYNQLFEENPINASGVDA
KAILSARLSKSRRLENLIAQLPGEKKNGLFGNLIALSLGLTPNFKSNFDLAEDAKLQLSKDTYDDDLDN
LLAQIGDQYADLFLAAKNLSDAILLSDILRVNTEITKAPLSASMIKRYDEHHQDLTLLKALVRQQLPEK
YKEIFFDQSKNGYAGYIDGGASQLEFYKFIKPILEKMDGTEELLVKLNREDLLRKQRTFDNGSIPHQIHL
GELHAILRRQEDFYPFLKDNREKIEKILTFRIPYYVGPLARGNSRFAWMTRKSEETITPWNFEEVVDKGA
SAQSFIERMTNFDKNLPNEKVLPKHSLLYEYFTVYNELTKVKYVTEGMRKPAFLSGEQKKAIVDLLFK
TNRKVTVKQLKEDYFKKIECFDSVEISGVEDRFNASLGTYHDLLKIIKDKDFLDNEENEDILEDIVLTLT
LFEDREMIEERLKTYAHLFDDKVMKQLKRRRYTGWGRLSRKLINGIRDKQSGKTILDFLKSDGFANRN
FMQLIHDDSLTFKEDIQKAQVSGQGDSLHEHIANLAGSPAIKKGILQTVKVVDELVKVMGRHKPENIVI
EMARENQTTQKGQKNSRERMKRIEEGIKELGSQILKEHPVENTQLQNEKLYLYYLQNGRDMYVDQEL
DINRLSDYDVDHIVPQSFLKDDSIDNKVLTRSDKNRGKSDNVPSEEVVKKMKNYWRQLLNAKLITQRK
FDNLTKAERGGLSELDKAGFIKRQLVETRQITKHVAQILDSRMNTKYDENDKLIREVKVITLKSKLVSD
FRKDFQFYKVREINNYHHAHDAYLNAVVGTALIKKYPKLESEFVYGDYKVYDVRKMIAKSEQEIGKA
TAKYFFYSNIMNFFKTEITLANGEIRKRPLIETNGETGEIVWDKGRDFATVRKVLSMPQVNIVKKTEVQ
TGGFSKESILPKRNSDKLIARKKDWDPKKYGGFESPTVAYSVLVVAKVEKGKSKKLKSVKELLGITIME
RSSFEKNPIDFLEAKGYKEVKKDLIIKLPKYSLFELENGRKRMLASAGELQKGNELALPSKYVNFLYLA
SHYEKLKGSPEDNEQKQLFVEQHKHYLDEIIEQISEFSKRVILADANLDKVLSAYNKHRDKPIREQAENI
IHLFTLTNLGAPAAFKYFDTTIDRKQYRSTKEVLDATLIHQSITGLYETRIDLSQLGGD
(single underline: HNH domain; double underline: RuvC domain)
KKH-nCas9 (D10A/E782K/N968K/R1015H) S. aureus Cas9 Nickase
(SEQ ID NO: 268)
MKRNYILGLAIGITSVGYGIIDYETRDVIDAGVRLFKEANVENNEGRRSKRGARRLKRRRRHRIQRVKK
LLFDYNLLTDHSELSGINPYEARVKGLSQKLSEEEFSAALLHLAKRRGVHNVNEVEEDTGNELSTKEQI
SRNSKALEEKYVAELQLERLKKDGEVRGSINRFKTSDYVKEAKQLLKVQKAYHQLDQSFIDTYIDLLE
TRRTYYEGPGEGSPFGWKDIKEWYEMLMGHCTYFPEELRSVKYAYNADLYNALNDLNNLVITRDENE
KLEYYEKFQIIENVFKQKKKPTLKQIAKEILVNEEDIKGYRVTSTGKPEFTNLKVYHDIKDITARKEIIEN
AELLDQIAKILTIYQSSEDIQEELTNLNSELTQEEIEQISNLKGYTGTHNLSLKAINLILDELWHTNDNQIA
IFNRLKLVPKKVDLSQQKEIPTTLVDDFILSPVVKRSFIQSIKVINAIIKKYGLPNDIIIELAREKNSKDAQK
MINEMQKRNRQTNERIEEIIRTTGKENAKYLIEKIKLHDMQEGKCLYSLEAIPLEDLLNNPFNYEVDHIIP
RSVSFDNSFNNKVLVKQEENSKKGNRTPFQYLSSSDSKISYETFKKHILNLAKGKGRISKTKKEYLLEER
DINRFSVQKDFINRNLVDTRYATRGLMNLLRSYFRVNNLDVKVKSINGGFTSFLRRKWKFKKERNKGY
KHHAEDALIIANADFIFKEWKKLDKAKKVMENQMFEEKQAESMPEIETEQEYKEIFITPHQIKHIKDFK
DYKYSHRVDKKPNRKLINDTLYSTRKDDKGNTLIVNNLNGLYDKDNDKLKKLINKSPEKLLMYHHDP
QTYQKLKLIMEQYGDEKNPLYKYYEETGNYLTKYSKKDNGPVIKKIKYYGNKLNAHLDITDDYPNSR
NKVVKLSLKPYRFDVYLDNGVYKFVTVKNLDVIKKENYYEVNSKCYEEAKKLKKISNQAEFIASFYKN
DLIKINGELYRVIGVNNDLLNRIEVNMIDITYREYLENMNDKRPPHIIKTIASKTQSIKKYSTDILGNLYE
VKSKKHPQIIKKG
Streptococcus thermophilus CRISPR1 Cas9 (St1Cas9) Nickase (D9A)
(SEQ ID NO: 269)
MSDLVLGLAIGIGSVGVGILNKVTGEIIHKNSRIFPAAQAENNLVRRTNRQGRRLTRRKKHRRVRLNRL
FEESGLITDFTKISINLNPYQLRVKGLTDELSNEELFIALKNMVKHRGISYLDDASDDGNSSIGDYAQIVK
ENSKQLETKTPGQIQLERYQTYGQLRGDFTVEKDGKKHRLINVFPTSAYRSEALRILQTQQEFNPQITDE
FINRYLEILTGKRKYYHGPGNEKSRTDYGRYRTSGETLDNIFGILIGKCTFYPDEFRAAKASYTAQEFNL
LNDLNNLTVPTETKKLSKEQKNQIINYVKNEKAMGPAKLFKYIAKLLSCDVADIKGYRIDKSGKAEIHT
FEAYRKMKTLETLDIEQMDRETLDKLAYVLTLNTEREGIQEALEHEFADGSFSQKQVDELVQFRKANS
SIFGKGWHNFSVKLMMELIPELYETSEEQMTILTRLGKQKTTSSSNKTKYIDEKLLTEEIYNPVVAKSVR
QAIKIVNAAIKEYGDFDNIVIEMARETNEDDEKKAIQKIQKANKDEKDAAMLKAANQYNGKAELPHSV
FHGHKQLATKIRLWHQQGERCLYTGKTISIHDLINNSNQFEVDHILPLSITFDDSLANKVLVYATANQE
KGQRTPYQALDSMDDAWSFRELKAFVRESKTLSNKKKEYLLTEEDISKFDVRKKFIERNLVDTRYASR
VVLNALQEHFRAHKIDTKVSVVRGQFTSQLRRHWGIEKTRDTYHHHAVDALIIAASSQLNLWKKQKN
TLVSYSEDQLLDIETGELISDDEYKESVFKAPYQHFVDTLKSKEFEDSILFSYQVDSKFNRKISDATIYAT
RQAKVGKDKADETYVLGKIKDIYTQDGYDAFMKIYKKDKSKFLMYRHDPQTFEKVIEPILENYPNKQI
NEKGKEVPCNPFLKYKEEHGYIRKYSKKGNGPEIKSLKYYDSKLGNHIDITPKDSNNKVVLQSVSPWR
ADVYFNKTTGKYEILGLKYADLQFEKGTGTYKISQEKYNDIKKKEGVDSDSEFKFTLYKNDLLLVKDT
ETKEQQLFRFLSRTMPKQKHYVELKPYDKQKFEGGEALIKVLGNVANSGQCKKGLGKSNISIYKVRTD
VLGNQHIIKNEGDKPKLDF
Streptococcus thermophilus CRISPR3Cas9 (St3Cas9) Nickase (D10A)
(SEQ ID NO: 2429)
MTKPYSIGLAIGTNSVGWAVITDNYKVPSKKMKVLGNTSKKYIKKNLLGVLLFDSGITAEGRRLKRTA
RRRYTRRRNRILYLQEIFSTEMATLDDAFFQRLDDSFLVPDDKRDSKYPIFGNLVEEKVYHDEFPTIYHL
RKYLADSTKKADLRLVYLALAHMIKYRGHFLIEGEFNSKNNDIQKNFQDFLDTYNAIFESDLSLENSKQ
LEEIVKDKISKLEKKDRILKLFPGEKNSGIFSEFLKLIVGNQADFRKCFNLDEKASLHFSKESYDEDLETL
LGYIGDDYSDVFLKAKKLYDAILLSGFLTVTDNETEAPLSSAMIKRYNEHKEDLALLKEYIRNISLKTYN
EVFKDDTKNGYAGYIDGKTNQEDFYVYLKNLLAEFEGADYFLEKIDREDFLRKQRTFDNGSIPYQIHLQ
EMRAILDKQAKFYPFLAKNKERIEKILTFRIPYYVGPLARGNSDFAWSIRKRNEKITPWNFEDVIDKESS
AEAFINRMTSFDLYLPEEKVLPKHSLLYETFNVYNELTKVRFIAESMRDYQFLDSKQKKDIVRLYFKDK
RKVTDKDIIEYLHAIYGYDGIELKGIEKQFNSSLSTYHDLLNIINDKEFLDDSSNEAIIEEIIHTLTIFEDRE
MIKQRLSKFENIFDKSVLKKLSRRHYTGWGKLSAKLINGIRDEKSGNTILDYLIDDGISNRNFMQLIHDD
ALSFKKKIQKAQIIGDEDKGNIKEVVKSLPGSPAIKKGILQSIKIVDELVKVMGGRKPESIVVEMARENQ
YTNQGKSNSQQRLKRLEKSLKELGSKILKENIPAKLSKIDNNALQNDRLYLYYLQNGKDMYTGDDLDI
DRLSNYDIDHIIPQAFLKDNSIDNKVLVSSASNRGKSDDFPSLEVVKKRKTFWYQLLKSKLISQRKFDNL
TKAERGGLLPEDKAGFIQRQLVETRQITKHVARLLDEKFNNKKDENNRAVRTVKIITLKSTLVSQFRKD
FELYKVREINDFHHAHDAYLNAVIASALLKKYPKLEPEFVYGDYPKYNSFRERKSATEKVYFYSNIMNI
FKKSISLADGRVIERPLIEVNEETGESVWNKESDLATVRRVLSYPQVNVVKKVEEQNHGLDRGKPKGL
FNANLSSKPKPNSNENLVGAKEYLDPKKYGGYAGISNSFAVLVKGTIEKGAKKKITNVLEFQGISILDRI
NYRKDKLNFLLEKGYKDIELIIELPKYSLFELSDGSRRMLASILSTNNKRGEIHKGNQIFLSQKFVKLLYH
AKRISNTINENHRKYVENHKKEFEELFYYILEFNENYVGAKKNGKLLNSAFQSWQNHSIDELCSSFIGPT
GSERKGLFELTSRGSAADFEFLGVKIPRYRDYTPSSLLKDATLIHQSVTGLYETRIDLAKLGEG

[0135] In some embodiments, the nucleobase editors useful in the present disclosure comprises: (i) a guide nucleotide sequence-programmable DNA-binding protein domain; and (ii) a deaminase domain. In some embodiments, the deaminase domain of the fusion protein is a cytosine deaminase. In some embodiments, the deaminase is an APOBEC1 deaminase. In some embodiments, the deaminase is a rat APOBEC1. In some embodiments, the deaminase is a human APOBEC1. In some embodiments, the deaminase is an APOBEC2 deaminase. In some embodiments, the deaminase is an APOBEC3A deaminase. In some embodiments, the deaminase is an APOBEC3B deaminase. In some embodiments, the deaminase is an APOBEC3C deaminase. In some embodiments, the deaminase is an APOBEC3D deaminase. In some embodiments, is an APOBEC3F deaminase. In some embodiments, the deaminase is an APOBEC3G deaminase. In some embodiments, the deaminase is an APOBEC3H deaminase. In some embodiments, the deaminase is an APOBEC4 deaminase. In some embodiments, the deaminase is an activation-induced deaminase (AID). In some embodiments, the deaminase is a Lamprey CDA1 (pmCDA1). In some embodiments, the deaminase is a human APOBEC3G or a functional fragment thereof. In some embodiments, the deaminase is an APOBEC3G variant comprising mutations corresponding to the D316R/D317R mutations in the human APOBEC3G. Exemplary, non-limiting cytosine deaminase sequences that may be used in accordance with the methods of the present disclosure are provided in Example 1 below.

[0136] In some embodiments, the cytosine deaminase is a wild type deaminase or a deaminase as set forth in SEQ ID NOs: 271-292, 303, and 2483-2494. In some embodiments, the cytosine deaminase domains of the fusion proteins provided herein include fragments of deaminases or proteins homologous to a deaminase. For example, in some embodiments, a deaminase domain comprises a fragment of any of the amino acid sequences set forth in any of SEQ ID NOs: 271-292, 303, and 2483-2494. In some embodiments, a deaminase domain comprises an amino acid sequence homologous to the amino acid sequence set forth in any of SEQ ID NOs: 271-292, 303, and 2483-2494, or an amino acid sequence homologous to a fragment of the amino acid sequence set forth in any of SEQ ID NOs: 271-292, 303, and 2483-2494. In some embodiments, proteins comprising a deaminase, fragments of a deaminase, or homologs of a deaminase are referred to as “deaminase variants.” A deaminase variant shares homology to a deaminase, or a fragment thereof. For example, a deaminase variant is at least about 70% identical, at least about 80% identical, at least about 90% identical, at least about 95% identical, at least about 96% identical, at least about 97% identical, at least about 98% identical, at least about 99% identical, at least about 99.5% identical, or at least about 99.9% to a wild type deaminase or a deaminase as set forth in any of SEQ ID NOs: 271-292, 303, and 2483-2494. In some embodiments, the deaminase variant comprises a fragment of the deaminase, such that the fragment is at least about 70% identical, at least about 80% identical, at least about 90% identical, at least about 95% identical, at least about 96% identical, at least about 97% identical, at least about 98% identical, at least about 99% identical, at least about 99.5% identical, or at least about 99.9% identical to the corresponding fragment of a wild type deaminase or a deaminase as set forth in any of SEQ ID NOs: 271-292, 303, and 2483-2494. In some embodiments, the cytosine deaminase is at least at least about 70% identical, at least about 80% identical, at least about 90% identical, at least about 95% identical, at least about 96% identical, at least about 97% identical, at least about 98% identical, at least about 99% identical, at least about 99.5% identical, or at least about 99.9% identical to an APOBEC3G variant as set forth in SEQ ID NO: 291 or SEQ ID NO: 292, and comprises mutations corresponding to the D316E/D317R mutations in SEQ ID NO: 290.

[0137] In some embodiments, the cytosine deaminase domain is fused to the N-terminus of the guide nucleotide sequence-programmable DNA-binding protein domain. For example, the fusion protein may have an architecture of NH₂-[cytosine deaminase]-[guide nucleotide sequence-programmable DNA-binding protein domain]-COOH. The “]-[” used in the general architecture above indicates the presence of an optional linker sequence. The term “linker,” as used herein, refers to a chemical group or a molecule linking two molecules or moieties, e.g., two domains of a fusion protein, such as, for example, a dCas9 domain and a cytosine deaminase domain. Typically, the linker is positioned between, or flanked by, two groups, molecules, or other moieties and connected to each one via a covalent bond, thus connecting the two. In some embodiments, the linker is an amino acid or a plurality of amino acids (e.g., a peptide or protein). In some embodiments, the linker is an organic molecule, group, polymer, or chemical moiety. In some embodiments, the linker is 5-100 amino acids in length, for example, 5, 6, 7, 8, 9, 10, 11, 12, 13, 14, 15, 16, 17, 18, 19, 20, 21, 22, 23, 24, 25, 26, 27, 28, 29, 30, 30-35, 35-40, 40-45, 45-50, 50-60, 60-70, 70-80, 80-90, 90-100, 100-150, or 150-200 amino acids in length. Longer or shorter linkers are also contemplated.

[0138] In some embodiments, the cytosine deaminase domain and the Cas9 domain are fused to each other via a linker. Various linker lengths and flexibilities between the deaminase domain (e.g., APOBEC1) and the Cas9 domain can be employed (e.g., ranging from very flexible linkers of the form (GGGS)ₙ (SEQ ID NO: 2430), (GGGGS)ₙ (SEQ ID NO: 308), (GGS)ₙ (SEQ ID NO: 2467), and (G)ₙ to more rigid linkers of the form (EAAAK)ₙ (SEQ ID NO: 309), SGSETPGTSESATPES (SEQ ID NO: 310)) (see, e.g., Guilinger et, al., Nat. Biotechnol. 2014; 32(6): 577-82; the entire contents are incorporated herein by reference), (SGGS)ₙSGSETPGTSESATPES(SGGS)ₙ (SEQ ID NO: 2481), (XP)ₙ, or a combination of any of these, wherein X is any amino acid, and n is independently an integer between 1 and 30, in order to achieve the optimal length for deaminase activity for the specific application. In some embodiments, n is independently 1, 2, 3, 4, 5, 6, 7, 8, 9, 10, 11, 12, 13, 14, 15, 16, 17, 18, 19, 20, 21, 22, 23, 24, 25, 26, 27, 28, 29, or 30, or, if more than one linker or more than one linker motif is present, any combination thereof. In some embodiments, the linker comprises a (GGS)ₙ motif, wherein n is 1, 2, 3, 4, 5, 6, 7, 8, 9, 10, 11, 12, 13, 14, or 15. In some embodiments, the linker comprises a (GGS)ₙ motif, wherein n is 1, 3, or 7. In some embodiments, the linker comprises the amino acid sequence SGSETPGTSESATPES (SEQ ID NO: 310), also referred to as the XTEN linker. In some embodiments, the linker comprises an amino acid sequence selected from the group including, but not limited to, AGVF, GFLG, FK, AL, ALAL, and ALALA. In some embodiments, suitable linker motifs and configurations include those described in Chen et al., Fusion protein linkers: property, design and functionality. Adv Drug Deliv Rev. 2013; 65(10):1357-69, which is incorporated herein by reference. In some embodiments, the linker comprises any of the following amino acid sequences: VPFLLEPDNINGKTC (SEQ ID NO: 311), GSAGSAAGSGEF (SEQ ID NO: 312), SIVAQLSRPDPA (SEQ ID NO: 313), MKIIEQLPSA (SEQ ID NO: 314), VRHKLKRVGS (SEQ ID NO: 315), GHGTGSTGSGSS (SEQ ID NO: 316), MSRPDPA (SEQ ID NO: 317), GSAGSAAGSGEF (SEQ ID NO: 312), SGSETPGTSESA (SEQ ID NO: 318), SGSETPGTSESATPEGGSGGS (SEQ ID NO: 319), or GGSM (SEQ ID NO: 320). Any linker provided under the “Linkers” section may be used.

[0139] In some embodiments, the nucleobase editor comprises a guide nucleotide sequence-programmable DNA-binding protein domain and an apolipoprotein B mRNA-editing complex 1 (APOBEC1) deaminase domain, where the deaminase domain is fused to the N-terminus of the napDNAbp domain via a linker comprising the amino acid sequence SGSETPGTSESATPES (SEQ ID NO: 310). In some embodiments, the a guide nucleotide sequence-programmable DNA-binding protein domain comprises the amino acid sequence of any of the a guide nucleotide sequence-programmable DNA-binding protein domains provided herein. In some embodiments, the deaminase is rat APOBEC1 (SEQ ID NO: 288). In some embodiments, the deaminase is human APOBEC1 (SEQ ID NO: 286). In some embodiments, the deaminase is pmCDA1 (SEQ ID NO: 289). In some embodiments, the deaminase is human APOBEC3G (SEQ ID NO: 279). In some embodiments, the deaminase is a human APOBEC3G variant of any one of (SEQ ID NOs: 290-292). In some embodiments, the fusion protein comprises a guide nucleotide sequence-programmable DNA-binding protein domain and an apolipoprotein B mRNA-editing complex 1 catalytic polypeptide-like 3G (APOBEC3G) deaminase domain, wherein the deaminase domain is fused to the N-terminus of the a guide nucleotide sequence-programmable DNA-binding protein domain domain via a linker of any length or composition (e.g., an amino acid sequence, a peptide, a polymer, or a bond). In some embodiments, the linker comprises the amino acid sequence SGSETPGTSESATPES (SEQ ID NO: 310). In some embodiments, the linker comprises the amino acid sequence (SGGS)₂SGSETPGTSESATPES(SGGS)₂ (SEQ ID NO: 2482).

[0140] In some embodiments, the fusion protein comprises a guide nucleotide sequence-programmable DNA-binding protein domain and a cytidine deaminase 1 (CDA1) deaminase domain, wherein the deaminase domain is fused to the N-terminus of the guide nucleotide sequence-programmable DNA-binding protein domain domain via a linker comprising the amino acid sequence SGSETPGTSESATPES (SEQ ID NO: 310). In some embodiments, the linker comprises the amino acid sequence (SGGS)₂SGSETPGTSESATPES(SGGS)₂ (SEQ ID NO: 2482). In some embodiments, the guide nucleotide sequence-programmable DNA-binding protein domain comprises the amino acid sequence of any of the guide nucleotide sequence-programmable DNA-binding protein domains provided herein.

[0141] In some embodiments, the fusion protein comprises a guide nucleotide sequence-programmable DNA-binding protein and an activation-induced cytidine deaminase (AID) deaminase domain, where the deaminase domain is fused to the N-terminus of the guide nucleotide sequence-programmable DNA-binding protein domain via a linker comprising the amino acid sequence SGSETPGTSESATPES (SEQ ID NO: 310). In some embodiments, the linker comprises the amino acid sequence (SGGS)₂SGSETPGTSESATPES(SGGS)₂ (SEQ ID NO: 2482). In some embodiments, the guide nucleotide sequence-programmable DNA-binding protein comprises the amino acid sequence of any of the guide nucleotide sequence-programmable DNA-binding protein domains provided herein.

[0142] Some aspects of the disclosure are based on the recognition that certain configurations of a guide nucleotide sequence-programmable DNA-binding protein, and a cytidine deaminase domain fused by a linker are useful for efficiently deaminating target cytidine residues. Other aspects of this disclosure relate to the recognition that a nucleobase editing fusion protein with an apolipoprotein B mRNA-editing complex 1 (APOBEC1) deaminase domain fused to the N-terminus of a guide nucleotide sequence-programmable DNA-binding protein via a linker comprising the amino acid sequence SGSETPGTSESATPES (SEQ ID NO: 310) was capable of efficiently deaminating target nucleic acids in a double stranded DNA target molecule. In some embodiments, the fusion protein comprises a guide nucleotide sequence-programmable DNA-binding protein domain and an apolipoprotein B mRNA-editing complex 1 (APOBEC1) deaminase domain, where the deaminase domain is fused to the N-terminus of the napDNAbp via a linker comprising the amino acid sequence SGSETPGTSESATPES (SEQ ID NO: 310). In some embodiments, the fusion protein comprises a guide nucleotide sequence-programmable DNA-binding protein domain and an apolipoprotein B mRNA-editing complex 1 (APOBEC1) deaminase domain, where the deaminase domain is fused to the N-terminus of the napDNAbp via a linker comprising the amino acid sequence (SGGS)₂SGSETPGTSESATPES(SGGS)₂ (SEQ ID NO: 2482).

[0143] To successfully edit the desired target C base, the linker between Cas9 and APOBEC may be optimized, as described in Komor et al., Nature, 533, 420-424 (2016), which is incorporated herein by reference. The numbering scheme for base editing is based on the predicted location of the target C within the single-stranded stretch of DNA (R-loop) displaced by a programmable guide RNA sequence occurring when a DNA-binding domain (e.g. Cas9, nCas9, dCas9) binds a genomic site. Conveniently, the sequence immediately surrounding the target C also matches the sequence of the guide RNA. The numbering scheme for base editing is based on a standard 20-mer programmable sequence, and defines position “21” as the first DNA base of the PAM sequence, resulting in position “1” assigned to the first DNA base matching the 5′-end of the 20-mer programmable guide RNA sequence. Therefore, for all Cas9 variants, position “21” is defined as the first base of the PAM sequence (e.g. NGG, NGAN, NGNG, NGAG, NGCG, NNGRRT, NGRRN, NNNRRT, NNNGATT, NNAGAA, NAAAC). When a longer programmable guide RNA sequence is used (e.g. 21-mer) the 5′-end bases are assigned a decreasing negative number starting at “-1”. For other DNA-binding domains that differ in the position of the PAM sequence, or that require no PAM sequence, the programmable guide RNA sequence is used as a reference for numbering. A 3-aa linker results in a 2-5 base editing window (e.g., positions 2, 3, 4, or 5 relative to the PAM sequence at position 21). A 9-aa linker results in a 3-6 base editing window (e.g., positions 3, 4, 5, or 6 relative to the PAM sequence at position 21). A 16-aa linker (e.g., the SGSETPGTSESATPES (SEQ ID NO: 310) linker) results in a 4-7 base editing window (e.g., positions 4, 5, 6, or 7 relative to the PAM sequence at position 21). A 21-aa linker results in a 5-8 base editing window (e.g., positions 5, 6, 7, or 8 relative to the PAM sequence at position 21). Each of these windows can be useful for editing different targeted C bases. For example, the targeted C bases may be at different distances from the adjacent PAM sequence, and by varying the linker length, the precise editing of the desired C base is ensured. One skilled in the art, based on the teachings of CRISPR/Cas9 technology in the art, and in particular the teachings of e.g., in U.S. Pat. No. 9,068,179, US Patent application Publications US 2015/0166980, published Jul. 18, 2015, US 2015/0166981, published Jul. 18, 2015; US 2015/0166982, published Jul. 18, 2015; US 2015/0166984, published Jul. 18, 2015; and US 2015/0165054, published Jul. 18, 2015; and US Provisional applications, U.S. Ser. No. 62/245,828, filed Oct. 23, 2015; 62/279,346, filed Jan. 15, 2016; 62/311,763, filed Mar. 22, 2016; 62/322,178, filed Apr. 13, 2016, 62/357,352, filed Jun. 30, 2016, 62/370,700, filed Aug. 3, 2016; 62/398,490, filed Sep. 22, 2016; 62/408,686, filed Oct. 14, 2016; PCT Application PCT/US2016/058344, filed Oct. 22, 2016, U.S. patent application Ser. No. 15/311,852, filed Oct. 22, 2016; and in Komor et al., Nature, Programmable editing of a target base in genomic DNA without double-stranded DNA cleavage, 533, 420-424 (2016), the entire contents of each of which are incorporated herein by reference, will be able to determine the window of editing for his/her purpose, and properly design the linker of the cytosine deaminase-dCas9 protein for the precise targeting of the desired C base.

[0144] To successfully edit the desired target C base, appropriate Cas9 domain may be selected to attach to the deaminase domain (e.g., APOBEC1), since different Cas9 domains may lead to different editing windows. For example, APOBEC1-XTEN-SaCas9n-UGI gives a 1-12 base editing window (e.g., positions 1, 2, 3, 4, 5, 6, 7, 8, 9, 10, 11, or 12 relative to the NNNRRT PAM sequence in positions 20-26). One skilled in the art, based on the teachings of CRISPR/Cas9 technology in the art, will be able to determine the editing window and properly determine the required Cas9 homolog and linker attached to the cytosine deaminase for the precise targeting of the desired C base.

[0145] In some embodiments, the fusion protein useful in the present disclosure further comprises a uracil glycosylase inhibitor (UGI) domain. A “uracil glycosylase inhibitor” refers to a protein that inhibits the activity of uracil-DNA glycosylase. The C to T base change induced by deamination results in a U:G heteroduplex, which triggers cellular DNA-repair response. Uracil DNA glycosylase (UDG) catalyzes removal of U from DNA in cells and initiates base excision repair, with reversion of the U:G pair to a C:G pair as the most common outcome. Thus, such cellular DNA-repair response may be responsible for the decrease in nucleobase editing efficiency in cells. Uracil DNA Glycosylase Inhibitor (UGI) is known in the art to block UDG activity. As described in Komor et al., Nature (2016), fusing a UGI domain to the cytidine deaminase-dCas9 fusion protein reduced the activity of UDG and significantly enhanced editing efficiency.

[0146] Suitable UGI protein and nucleotide sequences are provided herein and additional suitable UGI sequences are known to those in the art, and include, for example, those published in Wang et al., Uracil-DNA glycosylase inhibitor gene of bacteriophage PBS2 encodes a binding protein specific for uracil-DNA glycosylase. J. Biol. Chem. 264:1163-1171(1989); Lundquist et al., Site-directed mutagenesis and characterization of uracil-DNA glycosylase inhibitor protein. Role of specific carboxylic amino acids in complex formation with Escherichia coli uracil-DNA glycosylase. J. Biol. Chem. 272:21408-21419(1997); Ravishankar et al., X-ray analysis of a complex of Escherichia coli uracil DNA glycosylase (EcUDG) with a proteinaceous inhibitor. The structure elucidation of a prokaryotic UDG. Nucleic Acids Res. 26:4880-4887(1998); and Putnam et al., Protein mimicry of DNA from crystal structures of the uracil-DNA glycosylase inhibitor protein and its complex with Escherichia coli uracil-DNA glycosylase. J. Mol. Biol. 287:331-346(1999), each of which is incorporated herein by reference. In some embodiments, the UGI domain comprises the amino acid sequence of SEQ ID NO: 304 without the N-terminal methionine (M). In some embodiments, the UGI protein comprises the following amino acid sequence:

Bacillus phage PBS2 (Bacteriophage PBS2)Uracil-DNA
glycosylase inhibitor
(SEQ ID NO: 304)
MTNLSDIIEKETGKQLVIQESILMLPEEVEEVIGNKPESDILVHTAYDES
TDENVMLLTSDAPEYKPWALVIQDSNGENKIKML

[0147] In some embodiments, the UGI protein comprises a wild type UGI or a UGI as set forth in SEQ ID NO: 304. In some embodiments, the UGI proteins useful in the present disclosure include fragments of UGI and proteins homologous to a UGI or a UGI fragment. For example, in some embodiments, a UGI protein comprises a fragment of the amino acid sequence set forth in SEQ ID NO: 304. In some embodiments, a UGI comprises an amino acid sequence homologous to the amino acid sequence set forth in SEQ ID NO: 304 or an amino acid sequence homologous to a fragment of the amino acid sequence set forth in SEQ ID NO: 304. In some embodiments, proteins comprising UGI or fragments of UGI or homologs of UGI or UGI fragments are referred to as “UGI variants.” A UGI variant shares homology to UGI, or a fragment thereof. For example a UGI variant is at least about 70% identical, at least about 80% identical, at least about 90% identical, at least about 95% identical, at least about 96% identical, at least about 97% identical, at least about 98% identical, at least about 99% identical, at least about 99.5% identical, or at least about 99.9% to a wild type UGI or a UGI as set forth in SEQ ID NO: 304. In some embodiments, the UGI variant comprises a fragment of UGI, such that the fragment is at least about 70% identical, at least about 80% identical, at least about 90% identical, at least about 95% identical, at least about 96% identical, at least about 97% identical, at least about 98% identical, at least about 99% identical, at least about 99.5% identical, or at least about 99.9% identical to the corresponding fragment of wild type UGI or the UGI as set forth in SEQ ID NO: 304.

[0148] It should be appreciated that additional proteins may be uracil glycosylase inhibitors. For example, other proteins that are capable of inhibiting (e.g., sterically blocking) a uracil-DNA glycosylase base-excision repair enzyme are within the scope of this disclosure. In some embodiments, a uracil glycosylase inhibitor is a protein that binds DNA. In some embodiments, a uracil glycosylase inhibitor is a protein that binds single-stranded DNA. For example, a Erwinia tasmaniensis single-stranded binding protein may also inhibit the activity of uracil glycosylase. In some embodiments, the single-stranded binding protein comprises the amino acid sequence (SEQ ID NO: 305). In some embodiments, a uracil glycosylase inhibitor is a protein that binds uracil. In some embodiments, a uracil glycosylase inhibitor is a protein that binds uracil in DNA. In some embodiments, a uracil glycosylase inhibitor is a catalytically inactive uracil DNA-glycosylase protein. In some embodiments, a uracil glycosylase inhibitor is a catalytically inactive uracil DNA-glycosylase protein that does not excise uracil from the DNA. For example, a uracil glycosylase inhibitor is a UdgX. In some embodiments, the UdgX comprises the amino acid sequence (SEQ ID NO: 306). As another example, a uracil glycosylase inhibitor is a catalytically inactive UDG. In some embodiments, a catalytically inactive UDG comprises the amino acid sequence (SEQ ID NO: 307). It should be appreciated that other uracil glycosylase inhibitors would be apparent to the skilled artisan and are within the scope of this disclosure.

Erwinia tasmaniensis SSB (themostable single-stranded DNA binding protein)
(SEQ ID NO: 305)
MASRGVNKVILVGNLGQDPEVRYMPNGGAVANITLATSESWRDKQTGETKEKTEWHRVVLFGKLAE
VAGEYLRKGSQVYIEGALQTRKWTDQAGVEKYTTEVVVNVGGTMQMLGGRSQGGGASAGGQNGGS
NNGWGQPQQPQGGNQFSGGAQQQARPQQQPQQNNAPANNEPPIDFDDDIP
UdgX (binds to uracil in DNA but does not excise)
(SEQ ID NO: 306)
MAGAQDFVPHTADLAELAAAAGECRGCGLYRDATQAVFGAGGRSARIMMIGEQPGDKEDLAGLPFV
GPAGRLLDRALEAADIDRDALYVTNAVKHFKFTRAAGGKRRIHKTPSRTEVVACRPWLIAEMTSVEPD
VVVLLGATAAKALLGNDFRVTQHRGEVLHVDDVPGDPALVATVHPSSLLRGPKEERESAFAGLVDDL
RVAADVRP
UDG (catalytically inactive human UDG, binds to uracil in DNA but does not excise)
(SEQ ID NO: 307)
MIGQKTLYSFFSPSPARKRHAPSPEPAVQGTGVAGVPLESGDAAAIPAKKAPAGQEEPGTPPSSPLSALQ
LDRIQRNKAAALLRLAARNVPVGFGESWKKHLSGEFGKPYFIKLMGFVAEERKHYTVYPPPHQVFTW
TQMCDIKDVKVVILGQEPYHGPNQAHGLCFSVQRPVPPPPSLENIYKELSTDIEDFVHPGHGDLSGWAK
QGVLLLNAVLTVRAHQANSHKERGWEQFTDAVVSWLNQNSNGLVFLLWGSYAQKKGSAIDRKRHH
VLQTAHPSPLSVYRGFFGCRHFSKTNELLQKSGKKPIDWKEL

[0149] In some embodiments, the UGI domain is fused to the C-terminus of the dCas9 domain in the fusion protein. Thus, the fusion protein would have an architecture of NH₂-[cytosine deaminase]-[guide nucleotide sequence-programmable DNA-binding protein domain]-[UGI]-COOH. In some embodiments, the UGI domain is fused to the N-terminus of the cytosine deaminase domain. As such, the fusion protein would have an architecture of NH₂-[UGI]-[cytosine deaminase]-[guide nucleotide sequence-programmable DNA-binding protein domain]-COOH. In some embodiments, the UGI domain is fused between the guide nucleotide sequence-programmable DNA-binding protein domain and the cytosine deaminase domain. As such, the fusion protein would have an architecture of NH₂-[cytosine deaminase]-[UGI]-[guide nucleotide sequence-programmable DNA-binding protein domain]-COOH. The linker sequences useful in the present disclosure may also be used for the fusion of the UGI domain to the cytosine deaminase-dCas9 fusion proteins.

[0150] In some embodiments, the fusion protein comprises the structure:

[cytosine deaminase]-[optional linker sequence]-[guide nucleotide sequence-programmable DNA binding protein]-[optional linker sequence]-[UGI];
[cytosine deaminase]-[optional linker sequence]-[UGI]-[optional linker sequence]-[guide nucleotide sequence-programmable DNA binding protein];
[UGI]-[optional linker sequence]-[cytosine deaminase]-[optional linker sequence]-[guide nucleotide sequence-programmable DNA binding protein];
[UGI]-[optional linker sequence]-[guide nucleotide sequence-programmable DNA binding protein]-[optional linker sequence]-[cytosine deaminase];
[guide nucleotide sequence-programmable DNA binding protein]-[optional linker sequence]-[cytosine deaminase]-[optional linker sequence]-[UGI]; or
[guide nucleotide sequence-programmable DNA binding protein]-[optional linker sequence]-[UGI]-[optional linker sequence]-[cytosine deaminase].

[0151] In some embodiments, the fusion protein used in the present disclosure comprises the structure:

[cytosine deaminase]-[optional linker sequence]-[Cas9 nickase]-[optional linker sequence]-[UGI];
[cytosine deaminase]-[optional linker sequence]-[UGI]-[optional linker sequence]-[Cas9 nickase];
[UGI]-[optional linker sequence]-[cytosine deaminase]-[optional linker sequence]-[Cas9 nickase];
[UGI]-[optional linker sequence]-[Cas9 nickase]-[optional linker sequence]-[cytosine deaminase];
[Cas9 nickase]-[optional linker sequence]-[cytosine deaminase]-[optional linker sequence]-[UGI]; or
[Cas9 nickase]-[optional linker sequence]-[UGI]-[optional linker sequence]-[cytosine deaminase].

[0152] In some embodiments, fusion proteins useful in the present disclosure further comprise a nuclear localization sequence (NLS). In some embodiments, the NLS is fused to the N-terminus of the fusion protein. In some embodiments, the NLS is fused to the C-terminus of the fusion protein. In some embodiments, the NLS is fused to the N-terminus of the UGI protein. In some embodiments, the NLS is fused to the C-terminus of the UGI protein. In some embodiments, the NLS is fused to the N-terminus of the guide nucleotide sequence-programmable DNA-binding protein domain. In some embodiments, the NLS is fused to the C-terminus of the guide nucleotide sequence-programmable DNA-binding protein domain. In some embodiments, the NLS is fused to the N-terminus of the cytosine deaminase. In some embodiments, the NLS is fused to the C-terminus of the deaminase. In some embodiments, the NLS is fused to the fusion protein via one or more linkers. In some embodiments, the NLS is fused to the fusion protein without a linker. Non-limiting, exemplary NLS sequences may be PKKKRKV (SEQ ID NO: 2431) or MDSLLMNRRKFLYQFKNVRWAKGRRETYLC (SEQ ID NO: 2432).

[0153] In some embodiments, any of the fusion proteins provided herein comprise a second UGI domain. Fusion proteins comprising two UGI domains are described in U.S. Provisional application No., U.S. Ser. No. 62/475,830, filed Mar. 23, 2017; 62/490,587; 62/511,934, filed May 26, 2017; 62/551,951, filed Aug. 30, 2017; and Komor et al. (2017) Improved Base Excision Repair Inhibition and Bateriophage Mu Gam Protein Yields C:G-to-T:A base editors with higher efficiency and product purity. Sci Adv, 3: eaao4774; the entire contents of which is incorporated by reference herein. In some embodiments, the second UGI domain comprises a wild-type UGI or a UGI as set forth in SEQ ID NO: 304. In some embodiments, the UGI proteins provided herein include fragments of UGI and proteins homologous to a UGI or a UGI fragment. For example, in some embodiments, the second UGI domain comprises a fragment of the amino acid sequence set forth in SEQ ID NO: 304. In some embodiments, a UGI fragment comprises an amino acid sequence that comprises at least 60%, at least 65%, at least 70%, at least 75%, at least 80%, at least 85%, at least 90%, at least 95%, at least 96%, at least 97%, at least 98%, at least 99%, or at least 99.5% of the amino acid sequence as set forth in SEQ ID NO: 304. In some embodiments, the second UGI domain comprises an amino acid sequence homologous to the amino acid sequence set forth in SEQ ID NO: 304 or an amino acid sequence homologous to a fragment of the amino acid sequence set forth in SEQ ID NO: 304. In some embodiments, proteins comprising UGI or fragments of UGI or homologs of UGI or UGI fragments are referred to as “UGI variants.” A UGI variant shares homology to UGI, or a fragment thereof. For example a UGI variant is at least 70% identical, at least 75% identical, at least 80% identical, at least 85% identical, at least 90% identical, at least 95% identical, at least 96% identical, at least 97% identical, at least 98% identical, at least 99% identical, at least 99.5% identical, or at least 99.9% identical to a wild type UGI or a UGI as set forth in SEQ ID NO: 304. In some embodiments, the UGI variant comprises a fragment of UGI, such that the fragment is at least 70% identical, at least 80% identical, at least 90% identical, at least 95% identical, at least 96% identical, at least 97% identical, at least 98% identical, at least 99% identical, at least 99.5% identical, or at least 99.9% to the corresponding fragment of wild-type UGI or a UGI as set forth in SEQ ID NO: 304.

[0154] In some embodiments, the fusion protein comprises the structure:
[0155] [deaminase]-[optional linker sequence]-[dCas9]-[optional linker sequence]-[first UGI]-[optional linker sequence]-[second UGI];
[0156] [deaminase]-[optional linker sequence]-[Cas9 nickase]-[optional linker sequence]-[first UGI]-[optional linker sequence]-[second UGI]; or
[0157] [deaminase]-[optional linker sequence]-[Cas9]-[optional linker sequence]-[first UGI]-[optional linker sequence]-[second UGI].

[0158] In some embodiments, the nucleobase editor comprises a guide nucleotide sequence-programmable DNA-binding protein domain and an apolipoprotein B mRNA-editing complex 1 (APOBEC1) deaminase domain, wherein the deaminase domain is fused to the N-terminus of the guide nucleotide sequence-programmable DNA-binding protein domain via a linker comprising the amino acid sequence (SGGS)₂SGSETPGTSESATPES(SGGS)₂ (SEQ ID NO: 2482). In some embodiments, the a guide nucleotide sequence-programmable DNA-binding protein domain comprises the amino acid sequence of any of the a guide nucleotide sequence-programmable DNA-binding protein domains provided herein. In some embodiments, the deaminase is rat APOBEC1 (SEQ ID NO: 288). In some embodiments, the deaminase is human APOBEC1 (SEQ ID NO: 286). In some embodiments, the deaminase is a human APOBEC3G variant of any one of (SEQ ID NOs: 290-292). In some embodiments, the nucleobase editor comprises a first UGI domain fused to the C-terminus of a guide nucleotide sequence-programmable DNA-binding protein domain via a linker comprising the amino acid sequence (GGS)ₙ (SEQ ID NO: 2467), wherein n is 3. In some embodiments, the nucleobase editor comprises a second UGI domain fused to the C-terminus of a first UGI domain via a linker comprising the amino acid sequence (GGS)ₙ (SEQ ID NO: 2467), wherein n is 3.

[0159] In some embodiments, the fusion protein comprises the amino acid sequence of SEQ ID NO: 2495. In some embodiments, the fusion protein comprises an amino acid sequence that is at least 70%, at least 75%, at least 80%, at least 85%, at least 90%, at least 95%, at least 96%, at least 97%, at least 98%, at least 99%, or at least 99.5% identical to the amino acid sequence as set forth in SEQ ID NO: 2495.

[0160] In some embodiments, any of the fusion proteins provided herein may further comprise a Gam protein. The term “Gam protein,” as used herein, refers generally to proteins capable of binding to one or more ends of a double strand break of a double stranded nucleic acid (e.g., double stranded DNA). In some embodiments, the Gam protein prevents or inhibits degradation of one or more strands of a nucleic acid at the site of the double strand break. In some embodiments, a Gam protein is a naturally-occurring Gam protein from bacteriophage Mu, or a non-naturally occurring variant thereof. Fusion proteins comprising Gam proteins are described in Komor et al. (2017) Improved Base Excision Repair Inhibition and Bateriophage Mu Gam Protein Yields C:G-to-T:A base editors with higher efficiency and product purity. Sci Adv, 3: eaao4774; the entire contents of which is incorporated by reference herein. In some embodiments, the Gam protein comprises an amino acid sequence that is at least 70%, at least 75%, at least 80%, at least 85%, at least 90%, at least 92%, at least 95%, at least 96%, at least 97%, at least 98%, at least 99%, or at least 99.5% identical to the amino acid sequence provided by SEQ ID NO: 2496. In some embodiments, the Gam protein comprises the amino acid sequence of SEQ ID NO: 2496. In some embodiments, the fusion protein (e.g., BE4-Gam of SEQ ID NO: 2497) comprises a Gam protein, wherein the Cas9 domain of BE4 is replaced with any of the Cas9 domains provided herein.

Gam from bacteriophage Mu:
(SEQ ID NO: 2496)
AKPAKRIKSAAAAYVPQNRDAVITDIKRIGDLQREASRLETEMNDAIAEI
TEKFAARIAPIKTDIETLSKGVQGWCEANRDELTNGGKVKTANLVTGDVS
WRVRPPSVSIRGMDAVMETLERLGLQRFIRTKQEINKEAILLEPKAVAGV
AGITVKSGIEDFSIIPFEQEAGI
BE4-Gam:
(SEQ ID NO: 2497)
MAKPAKRIKSAAAAYVPQNRDAVITDIKRIGDLQREASRLETEMNDAIAE
ITEKFAARIAPIKTDIETLSKGVQGWCEANRDELINGGKVKTANLVTGDV
SWRVRPPSVSIRGMDAVMETLERLGLQRFIRTKQEINKEAILLEPKAVAG
VAGITVKSGIEDFSIIPFEQEAGISGSETPGTSESATPESSSETGPVAVD
PTLRRRIEPHEFEVFFDPRELRKETCLLYEINWGGRHSIWRHTSQNTNKH
VEVNFIEKFTTERYFCPNTRCSITWFLSWSPCGECSRAITEFLSRYPHVT
LFIYIARLYHHADPRNRQGLRDLISSGVTIQIMTEQESGYCWRNFVNYSP
SNEAHWPRYPHLWVRLYVLELYCIILGLPPCLNILRRKQPQLTFFTIALQ
SCHYQRLPPHILWATGLKSGGSSGGSSGSETPGTSESATPESSGGSSGGS
DKKYSIGLAIGTNSVGWAVITDEYKVPSKKFKVLGNTDRHSIKKNLIGAL
LFDSGETAEATRLKRTARRRYTRRKNRICYLQEIFSNEMAKVDDSFFHRL
EESFLVEEDKKHERHPIFGNIVDEVAYHEKYPTIYHLRKKLVDSTDKADL
RLIYLALAHMIKFRGHFLIEGDLNPDNSDVDKLFIQLVQTYNQLFEENPI
NASGVDAKAILSARLSKSRRLENLIAQLPGEKKNGLFGNLIALSLGLTPN
FKSNFDLAEDAKLQLSKDTYDDDLDNLLAQIGDQYADLFLAAKNLSDAIL
LSDILRVNTEITKAPLSASMIKRYDEHHQDLTLLKALVRQQLPEKYKEIF
FDQSKNGYAGYIDGGASQEEFYKFIKPILEKMDGTEELLVKLNREDLLRK
QRTFDNGSIPHQIHLGELHAILRRQEDFYPFLKDNREKIEKILTFRIPYY
VGPLARGNSRFAWMTRKSEETITPWNFEEVVDKGASAQSFIERMTNFDKN
LPNEKVLPKHSLLYEYFTVYNELTKVKYVTEGMRKPAFLSGEQKKAIVDL
LFKTNRKVTVKQLKEDYFKKIECFDSVEISGVEDRFNASLGTYHDLLKII
KDKDFLDNEENEDILEDIVLTLTLFEDREMIEERLKTYAHLFDDKVMKQL
KRRRYTGWGRLSRKLINGIRDKQSGKTILDFLKSDGFANRNFMQLIHDDS
LTFKEDIQKAQVSGQGDSLHEHIANLAGSPAIKKGILQTVKVVDELVKVM
GRHKPENIVIEMARENQTTQKGQKNSRERMKRIEEGIKELGSQILKEHPV
ENTQLQNEKLYLYYLQNGRDMYVDQELDINRLSDYDVDHIVPQSFLKDDS
IDNKVLTRSDKNRGKSDNVPSEEVVKKMKNYWRQLLNAKLITQRKFDNLT
KAERGGLSELDKAGFIKRQLVETRQITKHVAQILDSRMNTKYDENDKLIR
EVKVITLKSKLVSDFRKDFQFYKVREINNYHHAHDAYLNAVVGTALIKKY
PKLESEFVYGDYKVYDVRKMIAKSEQEIGKATAKYFFYSNIMNFFKTEIT
LANGEIRKRPLIETNGETGEIVWDKGRDFATVRKVLSMPQVNIVKKTEVQ
TGGFSKESILPKRNSDKLIARKKDWDPKKYGGFDSPTVAYSVLVVAKVEK
GKSKKLKSVKELLGITIMERSSFEKNPIDFLEAKGYKEVKKDLIIKLPKY
SLFELENGRKRMLASAGELQKGNELALPSKYVNFLYLASHYEKLKGSPED
NEQKQLFVEQHKHYLDEIIEQISEFSKRVILADANLDKVLSAYNKHRDKP
IREQAENIIHLFTLTNLGAPAAFKYFDTTIDRKRYTSTKEVLDATLIHQS
ITGLYETRIDLSQLGGDSGGSGGSGGSTNLSDIIEKETGKQLVIQESILM
LPEEVEEVIGNKPESDILVHTAYDESTDENVMLLTSDAPEYKPWALVIQD
SNGENKIKMLSGGSGGSGGSTNLSDIIEKETGKQLVIQESILMLPEEVEE
VIGNKPESDILVHTAYDESTDENVMLLTSDAPEYKPWALVIQDSNGENKI
KMLSGGSPKKKRK

### Linkers

[0161] In certain embodiments, linkers may be used to link any of the protein or protein domains described herein. The linker may be as simple as a covalent bond, or it may be a polymeric linker many atoms in length. In certain embodiments, the linker is a polypeptide or based on amino acids. In other embodiments, the linker is not peptide-like. In certain embodiments, the linker is a covalent bond (e.g., a carbon-carbon bond, disulfide bond, carbon-heteroatom bond, etc.). In certain embodiments, the linker is a carbon-nitrogen bond of an amide linkage. In certain embodiments, the linker is a cyclic or acyclic, substituted or unsubstituted, branched or unbranched aliphatic or heteroaliphatic linker. In certain embodiments, the linker is polymeric (e.g., polyethylene, polyethylene glycol, polyamide, polyester, etc.). In certain embodiments, the linker comprises a monomer, dimer, or polymer of aminoalkanoic acid. In certain embodiments, the linker comprises an aminoalkanoic acid (e.g., glycine, ethanoic acid, alanine, beta-alanine, 3-aminopropanoic acid, 4-aminobutanoic acid, 5-pentanoic acid, etc.). In certain embodiments, the linker comprises a monomer, dimer, or polymer of aminohexanoic acid (Ahx). In certain embodiments, the linker is based on a carbocyclic moiety (e.g., cyclopentane, cyclohexane). In other embodiments, the linker comprises a polyethylene glycol moiety (PEG). In other embodiments, the linker comprises amino acids. In certain embodiments, the linker comprises a peptide. In certain embodiments, the linker comprises an aryl or heteroaryl moiety. In certain embodiments, the linker is based on a phenyl ring. The linker may include functionalized moieties to facilitate attachment of a nucleophile (e.g., thiol, amino) from the peptide to the linker. Any electrophile may be used as part of the linker. Exemplary electrophiles include, but are not limited to, activated esters, activated amides, Michael acceptors, alkyl halides, aryl halides, acyl halides, and isothiocyanates.

[0162] In some embodiments, the linker is an amino acid or a plurality of amino acids (e.g., a peptide or protein). In some embodiments, the linker is a bond (e.g., a covalent bond), an organic molecule, group, polymer, or chemical moiety. In some embodiments, the linker is 5-100 amino acids in length, for example, 5, 6, 7, 8, 9, 10, 11, 12, 13, 14, 15, 16, 17, 18, 19, 20, 21, 22, 23, 24, 25, 26, 27, 28, 29, 30, 30-35, 35-40, 40-45, 45-50, 50-60, 60-70, 70-80, 80-90, 90-100, 100-110, 110-120, 120-130, 130-140, 140-150, or 150-200 amino acids in length. Longer or shorter linkers are also contemplated. In some embodiments, a linker comprises the amino acid sequence SGSETPGTSESATPES (SEQ ID NO: 310), which may also be referred to as the XTEN linker. In some embodiments, a linker comprises the amino acid sequence SGGS (SEQ ID NO: 37). In some embodiments, a linker comprises (SGGS)ₙ (SEQ ID NO: 2468), (GGGS)ₙ (SEQ ID NO: 2430), (GGGGS)ₙ (SEQ ID NO: 308), (G)ₙ, (EAAAK)ₙ (SEQ ID NO: 40), (GGS)ₙ (SEQ ID NO: 2467), SGSETPGTSESATPES (SEQ ID NO: 310), or (XP)ₙ motif, or a combination of any of these, wherein n is independently an integer between 1 and 30, and wherein X is any amino acid. In some embodiments, n is 1, 2, 3, 4, 5, 6, 7, 8, 9, 10, 11, 12, 13, 14, or 15. In some embodiments, a linker comprises SGSETPGTSESATPES (SEQ ID NO: 10), and SGGS (SEQ ID NO: 37). In some embodiments, a linker comprises SGGSSGSETPGTSESATPESSGGS (SEQ ID NO: 384). In some embodiments, a linker comprises SGGSSGGSSGSETPGTSESATPESSGGSSGGS (SEQ ID NO: 385). In some embodiments, a linker comprises

(SEQ ID NO: 386)
GGSGGSPGSPAGSPTSTEEGTSESATPESGPGTSTEPSEGSAPGSPAGS
PTSTEEGTSTEPSEGSAPGTSTEPSEGSAPGTSESATPESGPGSEPATS
GGSGGS.

### Nucleobase Editor/gRNA Complexes

[0163] Some aspects of the present disclosure provide nucleobase editors associated with a guide nucleotide sequence (e.g., a guide RNA or gRNA). gRNAs can exist as a complex of two or more RNAs, or as a single RNA molecule. gRNAs that exist as a single RNA molecule may be referred to as single-guide RNAs (sgRNAs), though “gRNA” is used interchangeably to refer to guide RNAs that exist as either single molecules or as a complex of two or more molecules. Typically, gRNAs that exist as a single RNA species comprise two domains: (1) a domain that shares homology to a target nucleic acid (e.g., and directs binding of the Cas9 complex to the target); and (2) a domain that binds the Cas9 protein. In some embodiments, domain (2) corresponds to a sequence known as a tracrRNA and comprises a stem-loop structure. For example, in some embodiments, domain (2) is identical or homologous to a tracrRNA as provided in Jinek et al., Science 337:816-821(2012), which is incorporated herein by reference. Other examples of gRNAs (e.g., those including domain 2) can be found in U.S. Provisional patent application, U.S. Ser. No. 61/874,682, filed Sep. 6, 2013, entitled “Switchable Cas9 Nucleases And Uses Thereof,” and U.S. Provisional patent application, U.S. Ser. No. 61/874,746, filed Sep. 6, 2013, entitled “Delivery System For Functional Nucleases,” each of which is incorporated herein by reference. The gRNA comprises a nucleotide sequence that complements a target site, which mediates binding of the nuclease/RNA complex to said target site, providing the sequence specificity of the nuclease:RNA complex. These proteins are able to be targeted, in principle, to any sequence specified by the guide RNA. Methods of using RNA-programmable nucleases, such as Cas9, for site-specific cleavage (e.g., to modify a genome) are known in the art (see e.g., Cong, L. et al. Science 339, 819-823 (2013); Mali, P. et al. Science 339, 823-826 (2013); Hwang, W. Y. et al. Nature Biotechnology 31, 227-229 (2013); Jinek, M. et al. eLife 2, e00471 (2013); Dicarlo, J. E. et al. Nucleic acids research (2013); Jiang, W. et al. Nature biotechnology 31, 233-239 (2013); each of which is incorporated herein by reference). In particular, examples of guide nucleotide sequences (e.g., sgRNAs) that may be used to target the fusion proteins useful in the present disclosure to its target sequence to deaminate the targeted C bases are described in Komor et al., Nature, 533, 420-424 (2016), which is incorporated herein by reference.

[0164] The specific structure of the guide nucleotide sequences (e.g., sgRNAs) depends on its target sequence and the relative distance of a PAM sequence downstream of the target sequence. One skilled in the art will understand that no unifying structure of guide nucleotide sequence is given, because the target sequences are different for each and every C targeted to be deaminated.

[0165] However, the present disclosure provides guidance on how to design the guide nucleotide sequence, e.g., a sgRNA, so that one skilled in the art may use such teachings to target a sequence of interest. A gRNA typically comprises a tracrRNA framework allowing for Cas9 binding, and a guide sequence, which confers sequence specificity to fusion proteins disclosed herein. In some embodiments, the guide RNA comprises a structure 5′-[guide sequence]-tracrRNA-3′. Non-limiting, exemplary tracrRNA sequences are shown in Table 13.

TABLE 13
tracrRNA othologues and sequences

| | | SEQ |
|---|---|---|
| | | ID |
| Organism | tracrRNA sequence | NO. |
| S. pyogenes | GUUUAAGAGCUAUGCUGGAAAGCCACGGUGAAAAAGUUCA | 322 |
| | ACUAUUGCCUGAUCGGAAUAAAUUUGAACGAUACGACAGU | |
| | CGGUGCUUUUUUU | |
| S. pyogenes | GUUUAAGAGCUAGAAAUAGCAAGUUUAAAUAAGGCUAGUC | 323 |
| | CGUUAUCAACUUGAAAAAGUGGCACCGAGUCGGUGCUUUU | |
| | UU | |
| S. thermophilus | GUUUUUGUACUCUCAAGAUUCAAUAAUCUUGCAGAAGCUA | 324 |
| CRISPR1 | CAAAGAUAAGGCUUCAUGCCGAAAUCAACACCCUGUCAUUU | |
| | UAUGGCAGGGUGUUUU | |
| S. thermophilus | GUUUUAGAGCUGUGUUGUUUGUUAAAACAACACAGCGAGU | 325 |
| CRISPR3 | UAAAAUAAGGCUUAGUCCGUACUCAACUUGAAAAGGUGGC | |
| | ACCGAUUCGGUGUUUUU | |
| C. jejuni | AAGAAAUUUAAAAAGGGACUAAAAUAAAGAGUUUGCGGGA | 326 |
| | CUCUGCGGGGUUACAAUCCCCUAAAACCGCUUUU | |
| F. novicida | AUCUAAAAUUAUAAAUGUACCAAAUAAUUAAUGCUCUGUA | 327 |
| | AUCAUUUAAAAGUAUUUUGAACGGACCUCUGUUUGACACG | |
| | UCUGAAUAACUAAAA | |
| S. thermophilus2 | UGUAAGGGACGCCUUACACAGUUACUUAAAUCUUGCAGAA | 328 |
| | GCUACAAAGAUAAGGCUUCAUGCCGAAAUCAACACCCUGUC | |
| | AUUUUAUGGCAGGGUGUUUUCGUUAUUU | |
| M. mobile | UGUAUUUCGAAAUACAGAUGUACAGUUAAGAAUACAUAAG | 329 |
| | AAUGAUACAUCACUAAAAAAAGGCUUUAUGCCGUAACUAC | |
| | UACUUAUUUUCAAAAUAAGUAGUUUUUUUU | |
| L. innocua | AUUGUUAGUAUUCAAAAUAACAUAGCAAGUUAAAAUAAGG | 330 |
| | CUUUGUCCGUUAUCAACUUUUAAUUAAGUAGCGCUGUUUC | |
| | GGCGCUUUUUUU | |
| S. pyogenes | GUUGGAACCAUUCAAAACAGCAUAGCAAGUUAAAAUAAGG | 331 |
| | CUAGUCCGUUAUCAACUUGAAAAAGUGGCACCGAGUCGGU | |
| | GCUUUUUUU | |
| S. mutans | GUUGGAAUCAUUCGAAACAACACAGCAAGUUAAAAUAAGG | 332 |
| | CAGUGAUUUUUAAUCCAGUCCGUACACAACUUGAAAAAGU | |
| | GCGCACCGAUUCGGUGCUUUUUUAUUU | |
| S. thermophilus | UUGUGGUUUGAAACCAUUCGAAACAACACAGCGAGUUAAA | 333 |
| | AUAAGGCUUAGUCCGUACUCAACUUGAAAAGGUGGCACCG | |
| | AUUCGGUGUUUUUUUU | |
| N. meningitidis | ACAUAUUGUCGCACUGCGAAAUGAGAACCGUUGCUACAAU | 334 |
| | AAGGCCGUCUGAAAAGAUGUGCCGCAACGCUCUGCCCCUUA | |
| | AAGCUUCUGCUUUAAGGGGCA | |
| P. multocida | GCAUAUUGUUGCACUGCGAAAUGAGAGACGUUGCUACAAU | 335 |
| | AAGGCUUCUGAAAAGAAUGACCGUAACGCUCUGCCCCUUGU | |
| | GAUUCUUAAUUGCAAGGGGCAUCGUUUUU | |

[0166] The guide sequence of the gRNA comprises a sequence that is complementary to the target sequence. The guide sequence is typically about 20 nucleotides long. For example, the guide sequence may be approximately 15-25 nucleotides long. In some embodiments, the guide sequence is 15, 16, 17, 18, 19, 20, 21, 22, 23, 24, or 25 nucleotides long. In some embodiments, the guide sequence is more than 25 nucleotides long. Such suitable guide RNA sequences typically comprise guide sequences that are complementary to a nucleic sequence within 50 nucleotides upstream or downstream of the target nucleotide to be edited.

[0167] In some embodiments, the guide RNA is about 15-100 nucleotides long and comprises a sequence of at least 10 contiguous nucleotides that is complementary to a target sequence. In some embodiments, the guide RNA is 15, 16, 17, 18, 19, 20, 21, 22, 23, 24, 25, 26, 27, 28, 29, 30, 31, 32, 33, 34, 35, 36, 37, 38, 39, 40, 41, 42, 43, 44, 45, 46, 47, 48, 49, or 50 nucleotides long. In some embodiments, the guide RNA comprises a sequence of 15, 16, 17, 18, 19, 20, 21, 22, 23, 24, 25, 26, 27, 28, 29, 30, 31, 32, 33, 34, 35, 36, 37, 38, 39, or 40 contiguous nucleotides that is complementary to a target sequence.

[0168] To edit the genes involved in pain propagation (e.g., ion channels in DRG neurons) using the methods described herein, the nucleobase editor and/or the guide nucleotide sequence is introduced into the cell (e.g., a DRG neuron) where the editing is to occur. In some embodiments, nucleic acid molecules (e.g., expression vectors) encoding the nucleobase editors and/or the guide nucleotide sequences are delivered into the cell, resulting in co-expression of the nucleobase editor(s) and/or the guide nucleotide sequence(s) in the cell. The nucleic acid molecules encoding the nucleobase editors and/or the guide nucleotide sequences may be delivered into the cell using any methods known in the art, e.g., transfection (e.g., transfection mediated by cationic liposomes), and transduction (e.g., via viral infection). In some embodiments, a nucleobase editor/gRNA complex is delivered. Methods of delivering a protein to a cell are familiar to those skilled in the art. For example, the nucleobase editor in complex with a gRNA may be associated with a supercharged or cell-penetrating protein or peptide, which facilitates its entry into a cell (e.g., as described in PCT Application Publication WO 2010/129023, published Nov. 11, 2010, and US Patent Application Publication US 2015/0071906, published Mar. 12, 2015, each of which is incorporated herein by reference). In some embodiments, the isolated nucleobase editor in complex with a gRNA is delivered to a cell using a cationic transfection reagent, e.g., the Lipofectamine CRISPRMAX Cas9 Transfection Reagent from Thermofisher Scientific. In some embodiments, the nucleobase editor and the gRNA may be delivered separately. Other suitable delivery methods may also be used, e.g., AAV mediated gene transfer. Strategies for delivery a genome editing agent (e.g., the nucleobase editor) using AAV have been described, e.g., in Zetsche et al., Nature Biotechnology 33, 139-142 (2015), incorporated herein by reference. Delivery of a split Cas9 using AAV has also been described, e.g., in Truong et al., Nucl. Acids Res. 43, 6450 (2016), and U.S. Provisional Application 62/408,575, filed Oct. 14, 2016, each of which is incorporated herein by reference.

[0169] In some embodiments, the genome editing agents (e.g., nucleobase editors) are delivered to neurons (e.g., DRG neurons) using neurotropic viral delivery vectors. Using neurotropic viral delivery vectors to deliver the genome editing agent enables genome editing treatments aimed at the site(s) of pain, despite the fact that the genetic material within the nuclei of DRG neurons is quite distant and indistinguishable from unrelated cells within each ganglion (e.g., as shown in FIG. 2).

[0170] In some embodiments, the neurotropic viral delivery vector is derived from a Herpes Simplex Virus 1 (HSV-1), which targets nerve endings in vivo and usurps retrograde axon transport to move the viral DNA up to the cell body of DRG neurons (e.g., as described in Smith et al., Annual Review of Microbiology, 66, 153-176, 2012, which is incorporated herein by reference). In addition, HSV-1 derived vectors allows packaging a large double-stranded DNA genome (>150 kbp), which can easily accommodate an expression construct for any programmable genome-editing enzyme (4-5 kbp), multiple guide-RNAs, and regulatory sequences. In some embodiments, the nucleotide sequences encoding the nucleobase editor and/or the gRNA is inserted into a neurotropic viral delivery vector (e.g., a HSV-1 derived vector) by replacing non-essential genes of the virus (e.g., HSV-1). Non-limiting examples of neurotropic viruses that may be used for the delivery of the genome editing agents described herein include the broader herpesviridae group, varicella-zoster, pseudorabies, cytomegalovirus, Epstein-Barr viruses, encephalitis viruses, polio, coxsackie, echo, mumps, measles, and rabies viruses. Evolved AAV that are neurotropic have also been described (e.g., Nature Biotechnology 34, 204-209 (2016), which is incorporated herein by reference) and may be used in accordance with the present disclosure. Delivery of a split Cas9 using AAV has also been described, e.g., in Truong et al., Nucl. Acids Res. 43, 6450 (2016), and US Provisional application, U.S. Ser. No. 62/408,575, filed Oct. 14, 2016, each of which is incorporated herein by reference.

[0171] In some embodiments, the expression of the genome editing agents (e.g., nucleobase editors and/or gRNAs) is driven by a neuron-specific promoter, such that the genome editing agent is expressed specifically in neurons. Non-limiting examples of neuron-specific promoters that may be used in accordance with the present disclosure include: human synapsin I (SYN) promoter (e.g., as described in Li et al., Proc Natl Acad Sci USA 1993; 90: 1460-1464, incorporated herein by reference), mouse calcium/calmodulin-dependent protein kinase II (CaMKII) promoter (e.g., as described in Mayford et al., Proc Natl Acad Sci USA 1996; 93: 13250-13255, incorporated herein by reference), rat tubulin alpha I (Tal) promoter (e.g., as described in Gloster et al., J Neurosci 1994; 14: 7319-7330, incorporated herein by reference), rat neuron-specific enolase (NSE) promoter (e.g., as described in Forss-Petter et al, Neuron 1990; 5: 187-197, incorporated herein by reference), and human platelet-derived growth factor-beta chain (PDGF) promoter (e.g., as described in Sasahara et al, Cell 1991; 64: 217-227, incorporated herein by reference). In some embodiments, the gRNA sequence is engineered such that it targets the genome editing agent (e.g., the nucleobase editor) to a target gene encoding an ion channel that is only expressed in neurons, thus minimizing or eliminating the effect on other types of tissues (i.e., enhanced specificity).

### Compositions

[0172] Aspects of the present disclosure relate to compositions that may be used for pain suppression. Such compositions comprise any of the genome editing agents (e.g., the nucleobase editor and/or gRNA) or nucleic acids (e.g., DNA, RNA) encoding the genome editing agent (e.g., a neurotropic viral delivery vector) described herein. In some embodiments, the composition is administered to a subject for pain suppression.

[0173] In some embodiments, the composition further comprises a pharmaceutically acceptable carrier. As used here, the term “pharmaceutically acceptable carrier” means a pharmaceutically acceptable material, composition or vehicle, such as a liquid or solid filler, diluent, excipient, manufacturing aid (e.g., lubricant, talc magnesium, calcium or zinc stearate, or steric acid), or solvent encapsulating material, involved in carrying or transporting the compound from one site (e.g., the delivery site) of the body, to another site (e.g., organ, tissue or portion of the body). A pharmaceutically acceptable carrier is “acceptable” in the sense of being compatible with the other ingredients of the formulation and not injurious to the tissue of the subject (e.g., physiologically compatible, sterile, physiologic pH, etc.). Some examples of materials which can serve as pharmaceutically acceptable carriers include: (1) sugars, such as lactose, glucose and sucrose; (2) starches, such as corn starch and potato starch; (3) cellulose, and its derivatives, such as sodium carboxymethyl cellulose, methylcellulose, ethyl cellulose, microcrystalline cellulose and cellulose acetate; (4) powdered tragacanth; (5) malt; (6) gelatin; (7) lubricating agents, such as magnesium stearate, sodium lauryl sulfate and talc; (8) excipients, such as cocoa butter and suppository waxes; (9) oils, such as peanut oil, cottonseed oil, safflower oil, sesame oil, olive oil, corn oil and soybean oil; (10) glycols, such as propylene glycol; (11) polyols, such as glycerin, sorbitol, mannitol and polyethylene glycol (PEG); (12) esters, such as ethyl oleate and ethyl laurate; (13) agar; (14) buffering agents, such as magnesium hydroxide and aluminum hydroxide; (15) alginic acid; (16) pyrogen-free water; (17) isotonic saline; (18) Ringer's solution; (19) ethyl alcohol; (20) pH buffered solutions; (21) polyesters, polycarbonates and/or polyanhydrides; (22) bulking agents, such as polypeptides, carbohydrates, and amino acids; (23) serum component, such as serum albumin, HDL, and LDL; (22) C2-C12 alcohols, such as ethanol; and (23) other non-toxic compatible substances employed in pharmaceutical formulations. Wetting agents, coloring agents, release agents, coating agents, sweetening agents, flavoring agents, perfuming agents, preservative and antioxidants can also be present in the formulation. The terms such as “excipient”, “carrier”, “pharmaceutically acceptable carrier” or the like are used interchangeably herein.

[0174] Suitable routes of administrating the composition for pain suppression include, without limitation: topical, subcutaneous, transdermal, intradermal, intralesional, intraarticular, intraperitoneal, intravesical, transmucosal, gingival, intradental, intracochlear, transtympanic, intraorgan, epidural, intrathecal, intramuscular, intravenous, intravascular, intraosseus, periocular, intratumoral, intracerebral, and intracerebroventricular administration.

[0175] In some embodiments, the composition for pain suppression is administered locally to the site of pain (e.g., via tropical administration or injection). In some embodiments, the localized volume of treatment is 1 μm³ to 1 dm³ (e.g., 1, 10 μm³, 100 μm³, 1000 μm³, 10000 μm³, or 1 dm³).

[0176] In some embodiments, the composition for pain suppression is administered to a subject by injection, by means of a catheter, by means of a suppository, or by means of an implant, the implant being of a porous, non-porous, or gelatinous material, including a membrane, such as a sialastic membrane, or a fiber.

[0177] In other embodiments, the compositions for pain suppression are delivered in a controlled release system. In one embodiment, a pump may be used (see, e.g., Langer, 1990, Science 249:1527-1533; Sefton, 1989, CRC Crit. Ref. Biomed. Eng. 14:201; Buchwald et al., 1980, Surgery 88:507; Saudek et al., 1989, N. Engl. J. Med. 321:574). In another embodiment, polymeric materials can be used. (See, e.g., Medical Applications of Controlled Release (Langer and Wise eds., CRC Press, Boca Raton, Fla., 1974); Controlled Drug Bioavailability, Drug Product Design and Performance (Smolen and Ball eds., Wiley, New York, 1984); Ranger and Peppas, 1983, Macromol. Sci. Rev. Macromol. Chem. 23:61. See also Levy et al., 1985, Science 228:190; During et al., 1989, Ann. Neurol. 25:351; Howard et al., 1989, J. Neurosurg. 71:105.) Other controlled release systems are discussed, for example, in Langer, supra.

[0178] In some embodiments, the composition is formulated in accordance with routine procedures as a composition adapted for intravenous or subcutaneous administration to a subject, e.g., a human. In some embodiments, compositions for administration by injection are solutions in sterile isotonic aqueous buffer. Where necessary, the pharmaceutical can also include a solubilizing agent and a local anesthetic such as lignocaine to ease pain at the site of the injection. Generally, the ingredients are supplied either separately or mixed together in unit dosage form, for example, as a dry lyophilized powder or water free concentrate in a hermetically sealed container such as an ampoule or sachette indicating the quantity of active agent. Where the pharmaceutical is to be administered by infusion, it can be dispensed with an infusion bottle containing sterile pharmaceutical grade water or saline. Where the pharmaceutical is administered by injection, an ampoule of sterile water for injection or saline can be provided so that the ingredients can be mixed prior to administration.

[0179] A composition for systemic administration may be a liquid, e.g., sterile saline, lactated Ringer's or Hank's solution. In addition, the pharmaceutical composition can be in solid forms and re-dissolved or suspended immediately prior to use. Lyophilized forms are also contemplated.

[0180] The pharmaceutical composition can be contained within a lipid particle or vesicle, such as a liposome or microcrystal, which is also suitable for parenteral administration. The particles can be of any suitable structure, such as unilamellar or plurilamellar, so long as compositions are contained therein. Compounds can be entrapped in “stabilized plasmid-lipid particles” (SPLP) containing the fusogenic lipid dioleoylphosphatidylethanolamine (DOPE), low levels (5-10 mol %) of cationic lipid, and stabilized by a polyethyleneglycol (PEG) coating (Zhang Y. P. et al., Gene Ther. 1999, 6:1438-47). Positively charged lipids such as N-[1-(2,3-dioleoyloxi)propyl]-N,N,N-trimethyl-amoniummethylsulfate, or “DOTAP,” are particularly preferred for such particles and vesicles. The preparation of such lipid particles is well known. See, e.g., U.S. Pat. Nos. 4,880,635; 4,906,477; 4,911,928; 4,917,951; 4,920,016; and 4,921,757; each of which is incorporated herein by reference.

[0181] The compositions of this disclosure may be administered or packaged as a unit dose, for example. The term “unit dose” when used in reference to a pharmaceutical composition of the present disclosure refers to physically discrete units suitable as unitary dosage for the subject, each unit containing a predetermined quantity of active material calculated to produce the desired therapeutic effect in association with the required diluent; i.e., carrier, or vehicle.

[0182] Further, the compositions of the present disclosure may be assembled into kits. In some embodiments, the kit comprises nucleic acid vectors for the expression of the genome-editing agents useful in the present disclosure. In some embodiments, the kit further comprises appropriate guide nucleotide sequences (e.g., gRNAs), or nucleic acid vectors for the expression of such guide nucleotide sequences, for targeting the nucleobase editor to the desired target sequence.

[0183] The kit described herein may include one or more containers housing components for performing the methods described herein and optionally instructions of uses. Any of the kit described herein may further comprise components needed for performing the assay methods. Each component of the kits, where applicable, may be provided in liquid form (e.g., in solution), or in solid form, (e.g., a dry powder). In certain cases, some of the components may be reconstitutable or otherwise processible (e.g., to an active form), for example, by the addition of a suitable solvent or other species (for example, water or certain organic solvents), which may or may not be provided with the kit.

[0184] In some embodiments, the kits may optionally include instructions and/or promotion for use of the components provided. As used herein, “instructions” can define a component of instruction and/or promotion, and typically involve written instructions on or associated with packaging of the disclosure. Instructions also can include any oral or electronic instructions provided in any manner such that a user will clearly recognize that the instructions are to be associated with the kit, for example, audiovisual (e.g., videotape, DVD, etc.), Internet, and/or web-based communications, etc. The written instructions may be in a form prescribed by a governmental agency regulating the manufacture, use, or sale of pharmaceuticals or biological products, which can also reflect approval by the agency of manufacture, use or sale for animal administration. As used herein, “promoted” includes all methods of doing business including methods of education, hospital and other clinical instruction, scientific inquiry, drug discovery or development, academic research, pharmaceutical industry activity including pharmaceutical sales, and any advertising or other promotional activity including written, oral and electronic communication of any form, associated with the disclosure. Additionally, the kits may include other components depending on the specific application, as described herein.

[0185] The kits may contain any one or more of the components described herein in one or more containers. The components may be prepared sterilely, packaged in a syringe and shipped refrigerated. Alternatively it may be housed in a vial or other container for storage. A second container may have other components prepared sterilely. Alternatively the kits may include the active agents premixed and shipped in a vial, tube, or other container.

[0186] The kits may have a variety of forms, such as a blister pouch, a shrink wrapped pouch, a vacuum sealable pouch, a sealable thermoformed tray, or a similar pouch or tray form, with the accessories loosely packed within the pouch, one or more tubes, containers, a box or a bag. The kits may be sterilized after the accessories are added, thereby allowing the individual accessories in the container to be otherwise unwrapped. The kits can be sterilized using any appropriate sterilization techniques, such as radiation sterilization, heat sterilization, or other sterilization methods known in the art. The kits may also include other components, depending on the specific application, for example, containers, cell media, salts, buffers, reagents, syringes, needles, a fabric, such as gauze, for applying or removing a disinfecting agent, disposable gloves, a support for the agents prior to administration, etc.

### Therapeutics

[0187] The compositions described herein, may be administered to a subject in need thereof, in a therapeutically effective amount, for the suppression of pain. In some embodiments, the pain is chronic pain. “Chronic pain” is pain that lasts a long time. Types of pain that may be treated using the pain suppression strategies described herein include, without limitation: pain associated with a condition such as cancer pain, tumor pressure, bone metastasis, chemotherapy peripheral neuropathy, radiculopathy (sciatica, lumbar, cervical, failed back surgery syndrome), piriformis syndrome, phantom pain, arachnoiditis, fibromyalgia, facet joint mediated pain, sympathetically-mediated pain syndrome such as complex regional pain syndromes (crps), sacroiliac (si) joint mediated pain, meralgia paresthetica, localized myofacial pain syndromes—myofacial trigger points, diffuse myofacial pain syndrome, post-herpetic neuralgia, trigeminal neuralgia, glossopharyngeal neuralgia, scar pain (post-epesiotomy, post-hernia repair, post-surgery, post-radiotherapy), vulvodynia, vaginismus, levator ani syndrome, chronic prostatitis, interstitial cystitis, first bite syndrome, rheumatoid arthritis pain, osteoarthritis pain, atypical odontalgia, phantom tooth pain, neuropathic orofacial pain, and atypical facial pain, nerve block procedures (alternative to neurolytic, neurectomy, radiation, radiofrequency ablation). In some embodiments, the pain is neuropathic pain, allodynia, hyperalgesia, dysesthesia, causalgia, neuralgia, primary erythermalgia, or arthralgia.

[0188] A “therapeutically effective amount” as used herein refers to the amount of each therapeutic agent of the present disclosure required to confer therapeutic effect on the subject, either alone or in combination with one or more other therapeutic agents. Effective amounts vary, as recognized by those skilled in the art, depending on the particular condition being treated, the severity of the condition, the individual subject parameters including age, physical condition, size, gender and weight, the duration of the treatment, the nature of concurrent therapy (if any), the specific route of administration and like factors within the knowledge and expertise of the health practitioner. These factors are well known to those of ordinary skill in the art and can be addressed with no more than routine experimentation. It is generally preferred that a maximum dose of the individual components or combinations thereof be used, that is, the highest safe dose according to sound medical judgment. It will be understood by those of ordinary skill in the art, however, that a subject may insist upon a lower dose or tolerable dose for medical reasons, psychological reasons or for virtually any other reasons. Empirical considerations, such as the half-life, generally will contribute to the determination of the dosage.

[0189] Frequency of administration may be determined and adjusted over the course of therapy, and is generally, but not necessarily, based on treatment and/or suppression and/or amelioration and/or delay of a disease. Alternatively, sustained continuous release formulations of a genome-editing may be appropriate. Various formulations and devices for achieving sustained release are known in the art. In some embodiments, dosage is daily, every other day, every three days, every four days, every five days, or every six days. In some embodiments, dosing frequency is once every week, every 2 weeks, every 4 weeks, every 5 weeks, every 6 weeks, every 7 weeks, every 8 weeks, every 9 weeks, or every 10 weeks; or once every month, every 2 months, or every 3 months, or longer. The progress of this therapy is easily monitored by conventional techniques and assays.

[0190] The dosing regimen can vary over time. In some embodiments, for an adult subject of normal weight, doses ranging from about 0.01 to 1000 mg/kg may be administered. In some embodiments, the dose is between 1 to 200 mg. The particular dosage regimen, i.e., dose, timing and repetition, will depend on the particular subject and that subject's medical history, as well as the properties of the agents.

[0191] For the purpose of the present disclosure, the appropriate dosage of a genome-editing agent as described herein will depend on the specific agent (or compositions thereof) employed, the formulation and route of administration, the type and severity of the disease, whether the genome-editing agent is administered for preventive or therapeutic purposes, previous therapy, the subject's clinical history and response to the antagonist, and the discretion of the attending physician. Typically the clinician will administer a genome-editing agent until a dosage is reached that achieves the desired result.

[0192] As used herein, the term “treating” refers to the application or administration of a genome-editing agent described herein or a composition comprising such genome-editing agent to a subject in need thereof. Alleviating a disease includes delaying the development or progression of the disease, or reducing disease severity. Alleviating the disease does not necessarily require curative results.

[0193] “Development” or “progression” of a disease means initial manifestations and/or ensuing progression of the disease. Development of the disease can be detectable and assessed using standard clinical techniques as well known in the art. However, development also refers to progression that may be undetectable. For purpose of this disclosure, development or progression refers to the biological course of the symptoms. “Development” includes occurrence, recurrence, and onset. As used herein “onset” or “occurrence” of a disease includes initial onset and/or recurrence.

[0194] The term “parenteral” as used herein includes subcutaneous, intracutaneous, intravenous, intramuscular, intraarticular, intraarterial, intrasynovial, intrasternal, intrathecal, intralesional, and intracranial injection or infusion techniques. In addition, it can be administered to the subject via injectable depot routes of administration such as using 1-, 3-, or 6-month depot injectable or biodegradable materials and methods.

[0195] Without further elaboration, it is believed that one skilled in the art can, based on the above description, utilize the present disclosure to its fullest extent. The following specific embodiments are, therefore, to be construed as merely illustrative, and not limitative of the remainder of the disclosure in any way whatsoever. All publications cited herein are incorporated by reference for the purposes or subject matter referenced herein.

### EXAMPLES

[0196] In order that the invention described herein may be more fully understood, the following examples are set forth. The synthetic examples described in this application are offered to illustrate the compounds and methods provided herein and are not to be construed in any way as limiting their scope.

### Example 1: Guide Nucleotide Sequence Programmable DNA-Binding Protein Domains, Deaminases, and Base Editors

[0197] Non-limiting examples of suitable guide nucleotide sequence-programmable DNA-binding protein domain s are provided. The disclosure provides Cas9 variants, for example, Cas9 proteins from one or more organisms, which may comprise one or more mutations (e.g., to generate dCas9 or Cas9 nickase). In some embodiments, one or more of the amino acid residues, identified below by an asterek, of a Cas9 protein may be mutated. In some embodiments, the D10 and/or H840 residues of the amino acid sequence provided in SEQ ID NO: 1, or a corresponding mutation in any of the amino acid sequences provided in SEQ ID NOs: 11-260, are mutated. In some embodiments, the D10 residue of the amino acid sequence provided in SEQ ID NO: 1, or a corresponding mutation in any of the amino acid sequences provided in SEQ ID NOs: 11-260, is mutated to any amino acid residue, except for D. In some embodiments, the D10 residue of the amino acid sequence provided in SEQ ID NO: 1, or a corresponding mutation in any of the amino acid sequences provided in SEQ ID NOs: 11-260, is mutated to an A. In some embodiments, the H840 residue of the amino acid sequence provided in SEQ ID NO: 1, or a corresponding residue in any of the amino acid sequences provided in SEQ ID NOs: 11-260, is an H. In some embodiments, the H840 residue of the amino acid sequence provided in SEQ ID NO: 1, or a corresponding mutation in any of the amino acid sequences provided in SEQ ID NOs: 11-260, is mutated to any amino acid residue, except for H. In some embodiments, the H840 residue of the amino acid sequence provided in SEQ ID NO: 1, or a corresponding mutation in any of the amino acid sequences provided in SEQ ID NOs: 11-260, is mutated to an A. In some embodiments, the D10 residue of the amino acid sequence provided in SEQ ID NO: 1, or a corresponding residue in any of the amino acid sequences provided in SEQ ID NOs: 11-260, is a D.

[0198] A number of Cas9 sequences from various species were aligned to determine whether corresponding homologous amino acid residues of D10 and H840 of SEQ ID NO: 1 or SEQ ID NO: 11 can be identified in other Cas9 proteins, allowing the generation of Cas9 variants with corresponding mutations of the homologous amino acid residues. The alignment was carried out using the NCBI Constraint-based Multiple Alignment Tool (COBALT(accessible at st-va.ncbi.nlm.nih.gov/tools/cobalt), with the following parameters. Alignment parameters: Gap penalties −11,−1; End-Gap penalties −5,−1. CDD Parameters: Use RPS BLAST on; Blast E-value 0.003; Find Conserved columns and Recompute on. Query Clustering Parameters: Use query clusters on; Word Size 4; Max cluster distance 0.8; Alphabet Regular.

[0199] An exemplary alignment of four Cas9 sequences is provided below. The Cas9 sequences in the alignment are: Sequence 1 (S1): SEQ ID NO: 11|WP_0109222511 gi 499224711|type II CRISPR RNA-guided endonuclease Cas9 [Streptococcus pyogenes]; Sequence 2 (S2): SEQ ID NO: 12|WP_039695303|gi 746743737|type II CRISPR RNA-guided endonuclease Cas9 [Streptococcus gallolyticus]; Sequence 3 (S3): SEQ ID NO: 13|WP_045635197|gi 782887988|type II CRISPR RNA-guided endonuclease Cas9 [Streptococcus mitis]; Sequence 4 (S4): SEQ ID NO: 14|5AXW_A|gi 924443546|Staphylococcus Aureus Cas9. The HNH domain (bold and underlined) and the RuvC domain (boxed) are identified for each of the four sequences. Amino acid residues 10 and 840 in S1 and the homologous amino acids in the aligned sequences are identified with an asterisk following the respective amino acid residue.

| | | | |
|---|---|---|---|
| S1 | 1 | --MDKK-YSIGLD*IGTNSVGWAVITDEYKVESKKFKVLGNTDRESIKENLI--GALLEDSG--ETAEATRLKRTARRRYT | 73 |
| S2 | 1 | --MTKKNYSIGLD*IGTNSVGWAVITDDYKVPAKKMKVIGNTDKKYIKENLL--GALLFDSG--ETAEATRLKRTARRRYT | 74 |
| S3 | 1 | --M-KKGYSIGLD*IGTNSVGFAVITDDYKVESKEMEVLGNTDKRFIKKNLI--GALLFDEG--TTAEARRLKRTARRRYT | 73 |
| S4 | 1 | GSHMKRNYILGLD*IGITSVGYGII--DYET-----------------RDVIDAGVRIFKEANVENNEGRRSKRGARRLKR | 61 |
| S1 | 74 | RRKNRICYLQEIFSNEMAKVDDSFFHRLEESFLVEEDKKHERHPIFGNIVDEVAYHEKYPTIYHLRKKLVDSTDKADLRL | 153 |
| S2 | 75 | RRKNRLRYLQEIFANEIAKVDESFFQRLDESFLTDDDKTEDSHPIFGNKAEEDAYHQKFPTIYHLRKHLADSSEKADLRL | 154 |
| S3 | 74 | RRKNRLRYLQEIFSEEMSKVDSSFFHRLDDSFLIPEDKRESKYPIFATLTEEKEYHKQFPTIYHLRKQLADSKEKTDLRL | 153 |
| S4 | 62 | RRRHRIQRVKKLL--------------FDYNLLTD--------------------HSELSGINPYEARVKGLSQKLSEEE | 107 |
| S1 | 154 | TYLALAHMIKFRGHFLIEGDLNPDNSDVDKLFIQLVQTYNQLFEENPINASGVDAKAILSARLSKSRRLENLIAQLPGEK | 233 |
| S2 | 155 | VYLALAHMIKFRGHFLIEGELNAENTDVQKIFADFVGVYNRTFDDSHLSEITVDVASILTEKISKSRRLENLIKYYPTEK | 234 |
| S3 | 154 | TYLALAHMIKYRGHFLYEEAFDIKNNDIQKIFNEFISIYDNTFEGSSLSGQNAQVEAIFTDKISKSAKRERVLKLFPDEK | 233 |
| S4 | 108 | FSAALLHLAKRRG----------------------VHNVNEVEEDT---------------------------------- | 131 |
| S1 | 234 | KNGLFGNLIALSLGLTPNEKSNFDLAEDAKLQLSKDTYDDDLDNLLAQIGDQYADLFLAAKNLSDAILLSDILRVNTEIT | 313 |
| S2 | 235 | KNTLFGNLIALALGLQPNEKTNFKLSEDAKLQFSKDTYEEDLEELLGKIGDDYADLFTSAKNLYDAILLSGILTVDDNST | 314 |
| S3 | 234 | STGLFSEFLKLIVGNQADFKKHFDLEDKAPLQFSKDTYDEDLENLLGQIGDDFTDLFVSAKKLYDAILLSGILTVTDPST | 313 |
| S4 | 132 | -----GNELS-------------------TKEQISRN------------------------------------------- | 144 |
| S1 | 314 | KAPLSASMIKRYDEHHQDLTLLKALVRQQLPEKYKEIFFDQSKNGYAGYIDGGASQEEFYKFIKPILEKM--DGTEELLV | 391 |
| S2 | 315 | KAPLSASMIKRYVEHHEDLEKLKEFIKANKSELYHDIFKDKNKNGYAGYIENGVKQDEFYKYLKNILSKIKIDGSDYFLD | 394 |
| S3 | 314 | KAPLSASMIERYENHQNDLAALKQFIKNNLPEKYDEVFSDQSKDGYAGYIDGKTTQETFYKYIKNLLSKF--EGTDYFLD | 391 |
| S4 | 145 | ----SKALEEKYVAELQ--------------------------------------------------LERLKKDG----- | 165 |
| S1 | 392 | KLNREDLLRKQRTFDNGSIPHQIHLGELHAILRRQEDFYPFLKDNREKIEKILTFRIPYYVGPLARGNSRFAWMTRKSEE | 471 |
| S2 | 395 | KIEREDFLRKQRTFDNGSIPHQIHLQEMHAILRRQGDYYPFLKEKQDRIEKILTFRIPYYVGPLVRKDSRFAWAEYRSDE | 474 |
| S3 | 392 | KIEREDFLRKQRTFDNGSIPHQIHLQEMNAILRRQGEYYPFLKDNKEKIEKILTFRIPYYVGPLARGNRDFAWLTRNSDE | 471 |
| S4 | 166 | --EVRGSINRFKTSD--------YVKEAKQLLKVQKAYHQLDQSFIDTYIDLLETRRTYYEGP--GEGSPFGW------K | 227 |
| S1 | 472 | TITPWNFEEVVDKGASAQSFIERMTNFDKNLPNEKVLPKHSLLYEYFTVYNELTKVKYVTEGMRKPAFLSGEQKKAIVDL | 551 |
| S2 | 475 | KITPWNFDKVIDKEKSAEKFITRMTLNDLYLPEEKVLPKHSHVYETYAVYNELTKIKYVNEQGKE-SFFDSNMKQEIFDH | 553 |
| S3 | 472 | AIRPWNFEEIVDKASSAEDFINKMTNYDLYLPEEKVLPKHSLLYETFAVYNELTKVKFIAEGLRDYQFLDSGQKKQIVNQ | 551 |
| S4 | 228 | DIKEW---------------YEMLMGHCTYFPEELRSVKYAYNADLYNALNDLNNLVITRDENEK---LEYYEKFQIIEN | 289 |
| S1 | 552 | LEKTNRKVTVKQLKEDYFKKIECFDSVEISGVEDR---FNASLGTYHDLLKIIKDKDFLDNEENEDILEDIVLTLTLFED | 628 |
| S2 | 554 | VFKENRKVTKEKLLNYLNKEFPEYRIKDLIGLDKENKSFNASLGTYHDLKKIL-DKAFLDDKVNEEVIEDIIKTLTLFED | 632 |
| S3 | 552 | LEKENRKVTEKDIIHYLHN-VDGYDGIELKGIEKQ---FNASLSTYHDLLKIIKDKEEMDDAKNEAILENIVHTLTIFED | 627 |
| S4 | 290 | VFKQKKKPTLKQIAKEILVNEEDIKGYRVTSTGKPEF---TNLKVYHDIKDITARKEII---ENAELLDQIAKILTIYQS | 363 |
| S1 | 629 | REMIEERLKTYAHLFDDKVMKQLKR-RRYTGWGRLSRKLINGIRDKQSGKTILDFLKSDGFANRNFMQLIHDDSLTFKED | 707 |
| S2 | 633 | KDMIHERLQKYSDIFTANQLKKLER-RHYTGWGRLSYKLINGIRNKENNKTILDYLIDDGSANRNFMQLINDDTLPFKQI | 711 |
| S3 | 628 | REMIKQRLAQYDSLFDEKVIKALTR-RHYTGWGKLSAKLINGICDKQTGNTILDYLIDDGKINRNFMQLINDDGLSFKEI | 706 |
| S4 | 364 | SEDIQEELTNLNSELTQEEIEQISNLKGYTGTHNLSLKAINLILDE------LWHTNDNQIAIFNRLKLVP--------- | 428 |
| S1 | 708 | [chemical structure] | 781 |
| S2 | 712 | [chemical structure] | 784 |
| S3 | 707 | [chemical structure] | 779 |
| S4 | 429 | [chemical structure] | 505 |
| S1 | 782 | KRIEEGIKELGSQIL-------KEHPVENTQLQNEKLYLYYLQNGRDMYVDQELDINRLSD----YDVDH*IVPQSFLKDD | 850 |
| S2 | 785 | KKLQNSLKELGSNILNEEKPSYIEDKVENSHLQNDQLFLYYIQNGKDMYTGDELDIDHLSD----YDIDH*IIPQAFIKDD | 860 |
| S3 | 780 | KRIEDSLKILASGL---DSNILKENPTDNNQLQNDRLFLYYLQNGKDMYTGEALDINQLSS----YDIDH*IIPQAFIKDD | 852 |
| S4 | 506 | ERIEEIIRTTGK---------------ENAKYLIEKIKLHDMQEGKCLYSLEAIPLEDLLNNPFNYEVDH*IIPRSVSFDN | 570 |
| S1 | 851 | [chemical structure] | 922 |
| S2 | 861 | [chemical structure] | 932 |
| S3 | 853 | [chemical structure] | 924 |
| S4 | 571 | [chemical structure] | 650 |
| S1 | 923 | [chemical structure] | 1002 |
| S2 | 933 | [chemical structure] | 1012 |
| S3 | 925 | [chemical structure] | 1004 |
| S4 | 651 | [chemical structure] | 712 |
| S1 | 1003 | [chemical structure] | 1077 |
| S2 | 1013 | [chemical structure] | 1083 |
| S3 | 1005 | [chemical structure] | 1081 |
| S4 | 713 | [chemical structure] | 764 |
| S1 | 1078 | [chemical structure] | 1149 |
| S2 | 1084 | [chemical structure] | 1158 |
| S3 | 1082 | [chemical structure] | 1156 |
| S4 | 765 | [chemical structure] | 835 |
| S1 | 1150 | EKGKSKKLKSVKELLGITIMERSSFEKNPI-DFLEAKG-----YKEVKKDLIIKLPKYSLFELENGRKRMLASAGELQKG | 1223 |
| S2 | 1159 | EKGKAKKLKTVKELVGISIMERSFFEENPV-EFLENKG-----YHNIREDKLIKLPKYSLFEFEGGRRRLLASASELQKG | 1232 |
| S3 | 1157 | EKGKAKKLKTVKTLVGITIMEKAAFEENPI-TFLENKG-----YHNVRKENILCLPKYSLFELENGRRRLLASAKELQKG | 1230 |
| S4 | 836 | DPQTYQKLK--------LIMEQYGDEKNPLYKYYEETGNYLTKYSKKDNGPVIKKIKYYGNKLNAHLDITDDYPNSRNKV | 907 |
| S1 | 1224 | NELALPSKYVNFLYLASHYEKLKGSPEDNEQKQLFVEQHKHYLDEITEQISEFSKRVILADANLDKVLSAYNKH------ | 1297 |
| S2 | 1233 | NEMVLPGYLVELLYHAHRADNF-----NSTEYLNYVSEHKKEFEKVLSCVEDFANLYVDVEKNLSKIRAVADSM------ | 1301 |
| S3 | 1231 | NEIVLPVYLTTLLYHSKNVHKL-----DEPGHLEYIQKHRNEFKDLLNLVSEFSQKYVLADANLEKIKSLYADN------ | 1299 |
| S4 | 908 | VKLSLKPYRFD-VYLDNGVYKFV-----TVKNLDVIK--KENYYEVNSKAYEEAKKLKKISNQAEFIASFYNNDLIKING | 979 |
| S1 | 1298 | RDKPIREQAENITHLFTLTNLGAPAAFKYFDTTIDRKRYTSTKEVLDATLIHQSIT--------GLYETRI----DLSQL | 1365 |
| S2 | 1302 | DNFSIEEISNSFINLLTLTALGAPADFNFLGEKIPRKRYTSTKECLNATLIHQSIT--------GLYETRI----DLSKL | 1369 |
| S3 | 1300 | EQADIEILANSFINLLTFTALGAPAAFKFFGKDIDRKRYTTVSEILNATLIHQSIT--------GLYETWI----DLSKL | 1367 |
| S4 | 980 | ELYRVIGVNNDLLNRIEVNMIDITYR-EYLENMNDKRPPRIIKTIASKT---QSIKKYSTDILGNLYEVKSKKHPQIIKK | 1055 |
| S1 | 1366 | GGD | 1368 |
| S2 | 1370 | GEE | 1372 |
| S3 | 1368 | GED | 1370 |
| S4 | 1056 | G-- | 1056 |

[0200] The alignment demonstrates that amino acid sequences and amino acid residues that are homologous to a reference Cas9 amino acid sequence or amino acid residue can be identified across Cas9 sequence variants, including, but not limited to Cas9 sequences from different species, by identifying the amino acid sequence or residue that aligns with the reference sequence or the reference residue using alignment programs and algorithms known in the art. This disclosure provides Cas9 variants in which one or more of the amino acid residues identified by an asterisk in SEQ ID NOs: 11-14 (e.g., 51, S2, S3, and S4, respectively) are mutated as described herein. The residues D10 and H840 in Cas9 of SEQ ID NO: 1 that correspond to the residues identified in SEQ ID NOs: 11-14 by an asterisk are referred to herein as “homologous” or “corresponding” residues. Such homologous residues can be identified by sequence alignment, e.g., as described above, and by identifying the sequence or residue that aligns with the reference sequence or residue. Similarly, mutations in Cas9 sequences that correspond to mutations identified in SEQ ID NO: 1 herein, e.g., mutations of residues 10, and 840 in SEQ ID NO: 1, are referred to herein as “homologous” or “corresponding” mutations. For example, the mutations corresponding to the D10A mutation in SEQ ID NO: 1 or 51 (SEQ ID NO: 11) for the four aligned sequences above are D11A for S2, D10A for S3, and D13A for S4; the corresponding mutations for H840A in SEQ ID NO: 1 or 51 (SEQ ID NO: 11) are H850A for S2, H842A for S3, and H560A for S4.

[0201] A total of 250 Cas9 sequences (SEQ ID NOs: 11-260) from different species are provided. Amino acid residues homologous to residues 10, and 840 of SEQ ID NO: 1 may be identified in the same manner as outlined above. All of these Cas9 sequences may be used in accordance with the present disclosure.

| | |
|---|---|
| WP_010922251.1 | type II CRISPR RNA-guided endonuclease Cas9 [Streptococcus pyogenes] SEQ ID NO: 11 |
| WP_039695303.1 | type II CRISPR RNA-guided endonuclease Cas9 [Streptococcus gallolyticus] SEQ ID NO: 12 |
| WP_045635197.1 | type II CRISPR RNA-guided endonuclease Cas9 [Streptococcus mitis] SEQ ID NO: 13 |
| 5AXW_A | Cas9, Chain A, Crystal Structure [Staphylococcus Aureus] SEQ ID NO: 14 |
| WP_009880683.1 | type II CRISPR RNA-guided endonuclease Cas9 [Streptococcus pyogenes] SEQ ID NO: 15 |
| WP_010922251.1 | type II CRISPR RNA-guided endonuclease Cas9 [Streptococcus pyogenes] SEQ ID NO: 16 |
| WP_011054416.1 | type II CRISPR RNA-guided endonuclease Cas9 [Streptococcus pyogenes] SEQ ID NO: 17 |
| WP_011284745.1 | type II CRISPR RNA-guided endonuclease Cas9 [Streptococcus pyogenes] SEQ ID NO: 18 |
| WP_011285506.1 | type II CRISPR RNA-guided endonuclease Cas9 [Streptococcus pyogenes] SEQ ID NO: 19 |
| WP_011527619.1 | type II CRISPR RNA-guided endonuclease Cas9 [Streptococcus pyogenes] SEQ ID NO: 20 |
| WP_012560673.1 | type II CRISPR RNA-guided endonuclease Cas9 [Streptococcus pyogenes] SEQ ID NO: 21 |
| WP_014407541.1 | type II CRISPR RNA-guided endonuclease Cas9 [Streptococcus pyogenes] SEQ ID NO: 22 |
| WP_020905136.1 | type II CRISPR RNA-guided endonuclease Cas9 [Streptococcus pyogenes] SEQ ID NO: 23 |
| WP_023080005.1 | type II CRISPR RNA-guided endonuclease Cas9 [Streptococcus pyogenes] SEQ ID NO: 24 |
| WP_023610282.1 | type II CRISPR RNA-guided endonuclease Cas9 [Streptococcus pyogenes] SEQ ID NO: 25 |
| WP_030125963.1 | type II CRISPR RNA-guided endonuclease Cas9 [Streptococcus pyogenes] SEQ ID NO: 26 |
| WP_030126706.1 | type II CRISPR RNA-guided endonuclease Cas9 [Streptococcus pyogenes] SEQ ID NO: 27 |
| WP_031488318.1 | type II CRISPR RNA-guided endonuclease Cas9 [Streptococcus pyogenes] SEQ ID NO: 28 |
| WP_032460140.1 | type II CRISPR RNA-guided endonuclease Cas9 [Streptococcus pyogenes] SEQ ID NO: 29 |
| WP_032461047.1 | type II CRISPR RNA-guided endonuclease Cas9 [Streptococcus pyogenes] SEQ ID NO: 30 |
| WP_032462016.1 | type II CRISPR RNA-guided endonuclease Cas9 [Streptococcus pyogenes] SEQ ID NO: 31 |
| WP_032462936.1 | type II CRISPR RNA-guided endonuclease Cas9 [Streptococcus pyogenes] SEQ ID NO: 32 |
| WP_032464890.1 | type II CRISPR RNA-guided endonuclease Cas9 [Streptococcus pyogenes] SEQ ID NO: 33 |
| WP_033888930.1 | type II CRISPR RNA-guided endonuclease Cas9 [Streptococcus pyogenes] SEQ ID NO: 34 |
| WP_038431314.1 | type II CRISPR RNA-guided endonuclease Cas9 [Streptococcus pyogenes] SEQ ID NO: 35 |
| WP_038432938.1 | type II CRISPR RNA-guided endonuclease Cas9 [Streptococcus pyogenes] SEQ ID NO: 36 |
| WP_038434062.1 | type II CRISPR RNA-guided endonuclease Cas9 [Streptococcus pyogenes] SEQ ID NO: 37 |
| BAQ51233.1 | CRISPR-associated protein, Csn1 family [Streptococcus pyogenes] SEQ ID NO: 38 |
| KGE60162.1 | hypothetical protein MGAS2111_0903 [Streptococcus pyogenes MGAS2111] SEQ ID NO: 39 |
| KGE60856.1 | CRISPR-associated endonuclease protein [Streptococcus pyogenes SS1447] SEQ ID NO: 40 |
| WP_002989955.1 | MULTISPECIES: type II CRISPR RNA-guided endonuclease Cas9 [Streptococcus] SEQ ID NO: 41 |
| WP_003030002.1 | MULTISPECIES: type II CRISPR RNA-guided endonuclease Cas9 [Streptococcus] SEQ ID NO: 42 |
| WP_003065552.1 | MULTISPECIES: type II CRISPR RNA-guided endonuclease Cas9 [Streptococcus] SEQ ID NO: 43 |
| WP_001040076.1 | type II CRISPR RNA-guided endonuclease Cas9 [Streptococcus agalactiae] SEQ ID NO: 44 |
| WP_001040078.1 | type II CRISPR RNA-guided endonuclease Cas9 [Streptococcus agalactiae] SEQ ID NO: 45 |
| WP_001040080.1 | type II CRISPR RNA-guided endonuclease Cas9 [Streptococcus agalactiae] SEQ ID NO: 46 |
| WP_001040081.1 | type II CRISPR RNA-guided endonuclease Cas9 [Streptococcus agalactiae] SEQ ID NO: 47 |
| WP_001040083.1 | type II CRISPR RNA-guided endonuclease Cas9 [Streptococcus agalactiae] SEQ ID NO: 48 |
| WP_001040085.1 | type II CRISPR RNA-guided endonuclease Cas9 [Streptococcus agalactiae] SEQ ID NO: 49 |
| WP_001040087.1 | type II CRISPR RNA-guided endonuclease Cas9 [Streptococcus agalactiae] SEQ ID NO: 50 |
| WP_001040088.1 | type II CRISPR RNA-guided endonuclease Cas9 [Streptococcus agalactiae] SEQ ID NO: 51 |
| WP_001040089.1 | type II CRISPR RNA-guided endonuclease Cas9 [Streptococcus agalactiae] SEQ ID NO: 52 |
| WP_001040090.1 | type II CRISPR RNA-guided endonuclease Cas9 [Streptococcus agalactiae] SEQ ID NO: 53 |
| WP_001040091.1 | type II CRISPR RNA-guided endonuclease Cas9 [Streptococcus agalactiae] SEQ ID NO: 54 |
| WP_001040092.1 | type II CRISPR RNA-guided endonuclease Cas9 [Streptococcus agalactiae] SEQ ID NO: 55 |
| WP_001040094.1 | type II CRISPR RNA-guided endonuclease Cas9 [Streptococcus agalactiae] SEQ ID NO: 56 |
| WP_001040095.1 | type II CRISPR RNA-guided endonuclease Cas9 [Streptococcus agalactiae] SEQ ID NO: 57 |
| WP_001040096.1 | type II CRISPR RNA-guided endonuclease Cas9 [Streptococcus agalactiae] SEQ ID NO: 58 |
| WP_001040097.1 | type II CRISPR RNA-guided endonuclease Cas9 [Streptococcus agalactiae] SEQ ID NO: 59 |
| WP_001040098.1 | type II CRISPR RNA-guided endonuclease Cas9 [Streptococcus agalactiae] SEQ ID NO: 60 |
| WP_001040099.1 | type II CRISPR RNA-guided endonuclease Cas9 [Streptococcus agalactiae] SEQ ID NO: 61 |
| WP_001040100.1 | type II CRISPR RNA-guided endonuclease Cas9 [Streptococcus agalactiae] SEQ ID NO: 62 |
| WP_001040104.1 | type II CRISPR RNA-guided endonuclease Cas9 [Streptococcus agalactiae] SEQ ID NO: 63 |
| WP_001040105.1 | type II CRISPR RNA-guided endonuclease Cas9 [Streptococcus agalactiae] SEQ ID NO: 64 |
| WP_001040106.1 | type II CRISPR RNA-guided endonuclease Cas9 [Streptococcus agalactiae] SEQ ID NO: 65 |
| WP_001040107.1 | type II CRISPR RNA-guided endonuclease Cas9 [Streptococcus agalactiae] SEQ ID NO: 66 |
| WP_001040108.1 | type II CRISPR RNA-guided endonuclease Cas9 [Streptococcus agalactiae] SEQ ID NO: 67 |
| WP_001040109.1 | type II CRISPR RNA-guided endonuclease Cas9 [Streptococcus agalactiae] SEQ ID NO: 68 |
| WP_001040110.1 | type II CRISPR RNA-guided endonuclease Cas9 [Streptococcus agalactiae] SEQ ID NO: 69 |
| WP_015058523.1 | type II CRISPR RNA-guided endonuclease Cas9 [Streptococcus agalactiae] SEQ ID NO: 70 |
| WP_017643650.1 | type II CRISPR RNA-guided endonuclease Cas9 [Streptococcus agalactiae] SEQ ID NO: 71 |
| WP_017647151.1 | type II CRISPR RNA-guided endonuclease Cas9 [Streptococcus agalactiae] SEQ ID NO: 72 |
| WP_017648376.1 | type II CRISPR RNA-guided endonuclease Cas9 [Streptococcus agalactiae] SEQ ID NO: 73 |
| WP_017649527.1 | type II CRISPR RNA-guided endonuclease Cas9 [Streptococcus agalactiae] SEQ ID NO: 74 |
| WP_017771611.1 | type II CRISPR RNA-guided endonuclease Cas9 [Streptococcus agalactiae] SEQ ID NO: 75 |
| WP_017771984.1 | type II CRISPR RNA-guided endonuclease Cas9 [Streptococcus agalactiae] SEQ ID NO: 76 |
| CFQ25032.1 | CRISPR-associated protein [Streptococcus agalactiae] SEQ ID NO: 77 |
| CFV16040.1 | CRISPR-associated protein [Streptococcus agalactiae] SEQ ID NO: 78 |
| KLJ37842.1 | CRISPR-associated protein Csn1 [Streptococcus agalactiae] SEQ ID NO: 79 |
| KLJ72361.1 | CRISPR-associated protein Csn1 [Streptococcus agalactiae] SEQ ID NO: 80 |
| KLL20707.1 | CRISPR-associated protein Csn1 [Streptococcus agalactiae] SEQ ID NO: 81 |
| KLL42645.1 | CRISPR-associated protein Csn1 [Streptococcus agalactiae] SEQ ID NO: 82 |
| WP_047207273.1 | type II CRISPR RNA-guided endonuclease Cas9 [Streptococcus agalactiae] SEQ ID NO: 83 |
| WP_047209694.1 | type II CRISPR RNA-guided endonuclease Cas9 [Streptococcus agalactiae] SEQ ID NO: 84 |
| WP_050198062.1 | type II CRISPR RNA-guided endonuclease Cas9 [Streptococcus agalactiae] SEQ ID NO: 85 |
| WP_050201642.1 | type II CRISPR RNA-guided endonuclease Cas9 [Streptococcus agalactiae] SEQ ID NO: 86 |
| WP_050204027.1 | type II CRISPR RNA-guided endonuclease Cas9 [Streptococcus agalactiae] SEQ ID NO: 87 |
| WP_050881965.1 | type II CRISPR RNA-guided endonuclease Cas9 [Streptococcus agalactiae] SEQ ID NO: 88 |
| WP_050886065.1 | type II CRISPR RNA-guided endonuclease Cas9 [Streptococcus agalactiae] SEQ ID NO: 89 |
| AHN30376.1 | CRISPR-associated protein Csn1 [Streptococcus agalactiae 138P] SEQ ID NO: 90 |
| EAO78426.1 | reticulocyte binding protein [Streptococcus agalactiae H36B] SEQ ID NO: 91 |
| CCW42055.1 | CRISPR-associated protein, SAG0894 family [Streptococcus agalactiae ILRI112] SEQ ID NO: 92 |
| WP_003041502.1 | type II CRISPR RNA-guided endonuclease Cas9 [Streptococcus anginosus] SEQ ID NO: 93 |
| WP_037593752.1 | type II CRISPR RNA-guided endonuclease Cas9 [Streptococcus anginosus] SEQ ID NO: 94 |
| WP_049516684.1 | CRISPR-associated protein Csn1 [Streptococcus anginosus] SEQ ID NO: 95 |
| GAD46167.1 | hypothetical protein ANG6_0662 [Streptococcus anginosus T5] SEQ ID NO: 96 |
| WP_018363470.1 | type II CRISPR RNA-guided endonuclease Cas9 [Streptococcus caballi] SEQ ID NO: 97 |
| WP_003043819.1 | type II CRISPR RNA-guided endonuclease Cas9 [Streptococcus canis] SEQ ID NO: 98 |
| WP_006269658.1 | type II CRISPR RNA-guided endonuclease Cas9 [Streptococcus constellatus] SEQ ID NO: 99 |
| WP_048800889.1 | type II CRISPR RNA-guided endonuclease Cas9 [Streptococcus constellatus] SEQ ID NO: 100 |
| WP_012767106.1 | type II CRISPR RNA-guided endonuclease Cas9 [Streptococcus dysgalactiae] SEQ ID NO: 101 |
| WP_014612333.1 | type II CRISPR RNA-guided endonuclease Cas9 [Streptococcus dysgalactiae] SEQ ID NO: 102 |
| WP_015017095.1 | type II CRISPR RNA-guided endonuclease Cas9 [Streptococcus dysgalactiae] SEQ ID NO: 103 |
| WP_015057649.1 | type II CRISPR RNA-guided endonuclease Cas9 [Streptococcus dysgalactiae] SEQ ID NO: 104 |
| WP_048327215.1 | type II CRISPR RNA-guided endonuclease Cas9 [Streptococcus dysgalactiae] SEQ ID NO: 105 |
| WP_049519324.1 | CRISPR-associated protein Csn1 [Streptococcus dysgalactiae] SEQ ID NO: 106 |
| WP_012515931.1 | type II CRISPR RNA-guided endonuclease Cas9 [Streptococcus equi] SEQ ID NO: 107 |
| WP_021320964.1 | type II CRISPR RNA-guided endonuclease Cas9 [Streptococcus equi] SEQ ID NO: 108 |
| WP_037581760.1 | type II CRISPR RNA-guided endonuclease Cas9 [Streptococcus equi] SEQ ID NO: 109 |
| WP_004232481.1 | type II CRISPR RNA-guided endonuclease Cas9 [Streptococcus equinus] SEQ ID NO: 110 |
| WP_009854540.1 | type II CRISPR RNA-guided endonuclease Cas9 [Streptococcus gallolyticus] SEQ ID NO: 111 |
| WP_012962174.1 | type II CRISPR RNA-guided endonuclease Cas9 [Streptococcus gallolyticus] SEQ ID NO: 112 |
| WP_039695303.1 | type II CRISPR RNA-guided endonuclease Cas9 [Streptococcus gallolyticus] SEQ ID NO: 113 |
| WP_014334983.1 | type II CRISPR RNA-guided endonuclease Cas9 [Streptococcus infantarius] SEQ ID NO: 114 |
| WP_003099269.1 | type II CRISPR RNA-guided endonuclease Cas9 [Streptococcus iniae] SEQ ID NO: 115 |
| AHY15608.1 | CRISPR-associated protein Csn1 [Streptococcus iniae] SEQ ID NO: 116 |
| AHY17476.1 | CRISPR-associated protein Csn1 [Streptococcus iniae] SEQ ID NO: 117 |
| ESR09100.1 | hypothetical protein IUSA1_08595 [Streptococcus iniae IUSA1] SEQ ID NO: 118 |
| AGM98575.1 | CRISPR-associated protein Cas9/Csn1, subtype II/NMEMI [Streptococcus iniae SF1] SEQ ID NO: 119 |
| ALF27331.1 | CRISPR-associated protein Csn1 [Streptococcus intermedius] SEQ ID NO: 120 |
| WP_018372492.1 | type II CRISPR RNA-guided endonuclease Cas9 [Streptococcus massiliensis] SEQ ID NO: 121 |
| WP_045618028.1 | type II CRISPR RNA-guided endonuclease Cas9 [Streptococcus mitis] SEQ ID NO: 122 |
| WP_045635197.1 | type II CRISPR RNA-guided endonuclease Cas9 [Streptococcus mitis] SEQ ID NO: 123 |
| WP_002263549.1 | type II CRISPR RNA-guided endonuclease Cas9 [Streptococcus mutans] SEQ ID NO: 124 |
| WP_002263887.1 | type II CRISPR RNA-guided endonuclease Cas9 [Streptococcus mutans] SEQ ID NO: 125 |
| WP_002264920.1 | type II CRISPR RNA-guided endonuclease Cas9 [Streptococcus mutans] SEQ ID NO: 126 |
| WP_002269043.1 | type II CRISPR RNA-guided endonuclease Cas9 [Streptococcus mutans] SEQ ID NO: 127 |
| WP_002269448.1 | type II CRISPR RNA-guided endonuclease Cas9 [Streptococcus mutans] SEQ ID NO: 128 |
| WP_002271977.1 | type II CRISPR RNA-guided endonuclease Cas9 [Streptococcus mutans] SEQ ID NO: 129 |
| WP_002272766.1 | type II CRISPR RNA-guided endonuclease Cas9 [Streptococcus mutans] SEQ ID NO: 130 |
| WP_002273241.1 | type II CRISPR RNA-guided endonuclease Cas9 [Streptococcus mutans] SEQ ID NO: 131 |
| WP_002275430.1 | type II CRISPR RNA-guided endonuclease Cas9 [Streptococcus mutans] SEQ ID NO: 132 |
| WP_002276448.1 | type II CRISPR RNA-guided endonuclease Cas9 [Streptococcus mutans] SEQ ID NO: 133 |
| WP_002277050.1 | type II CRISPR RNA-guided endonuclease Cas9 [Streptococcus mutans] SEQ ID NO: 134 |
| WP_002277364.1 | type II CRISPR RNA-guided endonuclease Cas9 [Streptococcus mutans] SEQ ID NO: 135 |
| WP_002279025.1 | type II CRISPR RNA-guided endonuclease Cas9 [Streptococcus mutans] SEQ ID NO: 136 |
| WP_002279859.1 | type II CRISPR RNA-guided endonuclease Cas9 [Streptococcus mutans] SEQ ID NO: 137 |
| WP_002280230.1 | type II CRISPR RNA-guided endonuclease Cas9 [Streptococcus mutans] SEQ ID NO: 138 |
| WP_002281696.1 | type II CRISPR RNA-guided endonuclease Cas9 [Streptococcus mutans] SEQ ID NO: 139 |
| WP_002282247.1 | type II CRISPR RNA-guided endonuclease Cas9 [Streptococcus mutans] SEQ ID NO: 140 |
| WP_002282906.1 | type II CRISPR RNA-guided endonuclease Cas9 [Streptococcus mutans] SEQ ID NO: 141 |
| WP_002283846.1 | type II CRISPR RNA-guided endonuclease Cas9 [Streptococcus mutans] SEQ ID NO: 142 |
| WP_002287255.1 | type II CRISPR RNA-guided endonuclease Cas9 [Streptococcus mutans] SEQ ID NO: 143 |
| WP_002288990.1 | type II CRISPR RNA-guided endonuclease Cas9 [Streptococcus mutans] SEQ ID NO: 144 |
| WP_002289641.1 | type II CRISPR RNA-guided endonuclease Cas9 [Streptococcus mutans] SEQ ID NO: 145 |
| WP_002290427.1 | type II CRISPR RNA-guided endonuclease Cas9 [Streptococcus mutans] SEQ ID NO: 146 |
| WP_002295753.1 | type II CRISPR RNA-guided endonuclease Cas9 [Streptococcus mutans] SEQ ID NO: 147 |
| WP_002296423.1 | type II CRISPR RNA-guided endonuclease Cas9 [Streptococcus mutans] SEQ ID NO: 148 |
| WP_002304487.1 | type II CRISPR RNA-guided endonuclease Cas9 [Streptococcus mutans] SEQ ID NO: 149 |
| WP_002305844.1 | type II CRISPR RNA-guided endonuclease Cas9 [Streptococcus mutans] SEQ ID NO: 150 |
| WP_002307203.1 | type II CRISPR RNA-guided endonuclease Cas9 [Streptococcus mutans] SEQ ID NO: 151 |
| WP_002310390.1 | type II CRISPR RNA-guided endonuclease Cas9 [Streptococcus mutans] SEQ ID NO: 152 |
| WP_002352408.1 | type II CRISPR RNA-guided endonuclease Cas9 [Streptococcus mutans] SEQ ID NO: 153 |
| WP_012997688.1 | type II CRISPR RNA-guided endonuclease Cas9 [Streptococcus mutans] SEQ ID NO: 154 |
| WP_014677909.1 | type II CRISPR RNA-guided endonuclease Cas9 [Streptococcus mutans] SEQ ID NO: 155 |
| WP_019312892.1 | type II CRISPR RNA-guided endonuclease Cas9 [Streptococcus mutans] SEQ ID NO: 156 |
| WP_019313659.1 | type II CRISPR RNA-guided endonuclease Cas9 [Streptococcus mutans] SEQ ID NO: 157 |
| WP_019314093.1 | type II CRISPR RNA-guided endonuclease Cas9 [Streptococcus mutans] SEQ ID NO: 158 |
| WP_019315370.1 | type II CRISPR RNA-guided endonuclease Cas9 [Streptococcus mutans] SEQ ID NO: 159 |
| WP_019803776.1 | type II CRISPR RNA-guided endonuclease Cas9 [Streptococcus mutans] SEQ ID NO: 160 |
| WP_019805234.1 | type II CRISPR RNA-guided endonuclease Cas9 [Streptococcus mutans] SEQ ID NO: 161 |
| WP_024783594.1 | type II CRISPR RNA-guided endonuclease Cas9 [Streptococcus mutans] SEQ ID NO: 162 |
| WP_024784288.1 | type II CRISPR RNA-guided endonuclease Cas9 [Streptococcus mutans] SEQ ID NO: 163 |
| WP_024784666.1 | type II CRISPR RNA-guided endonuclease Cas9 [Streptococcus mutans] SEQ ID NO: 164 |
| WP_024784894.1 | type II CRISPR RNA-guided endonuclease Cas9 [Streptococcus mutans] SEQ ID NO: 165 |
| WP_024786433.1 | type II CRISPR RNA-guided endonuclease Cas9 [Streptococcus mutans] SEQ ID NO: 166 |
| WP_049473442.1 | CRISPR-associated protein Csn1 [Streptococcus mutans] SEQ ID NO: 167 |
| WP_049474547.1 | CRISPR-associated protein Csn1 [Streptococcus mutans] SEQ ID NO: 168 |
| EMC03581.1 | hypothetical protein SMU69_09359 [Streptococcus mutans NLML4] SEQ ID NO: 169 |
| WP_000428612.1 | type II CRISPR RNA-guided endonuclease Cas9 [Streptococcus oralis] SEQ ID NO: 170 |
| WP_000428613.1 | type II CRISPR RNA-guided endonuclease Cas9 [Streptococcus oralis] SEQ ID NO: 171 |
| WP_049523028.1 | CRISPR-associated protein Csn1 [Streptococcus parasanguinis] SEQ ID NO: 172 |
| WP_003107102.1 | type II CRISPR RNA-guided endonuclease Cas9 [Streptococcus parauberis] SEQ ID NO: 173 |
| WP_054279288.1 | type II CRISPR RNA-guided endonuclease Cas9 [Streptococcus phocae] SEQ ID NO: 174 |
| WP_049531101.1 | CRISPR-associated protein Csn1 [Streptococcus pseudopneumoniae] SEQ ID NO: 175 |
| WP_049538452.1 | CRISPR-associated protein Csn1 [Streptococcus pseudopneumoniae] SEQ ID NO: 176 |
| WP_049549711.1 | CRISPR-associated protein Csn1 [Streptococcus pseudopneumoniae] SEQ ID NO: 177 |
| WP_007896501.1 | type II CRISPR RNA-guided endonuclease Cas9 [Streptococcus pseudoporcinus] SEQ ID NO: 178 |
| EFR44625.1 | CRISPR-associated protein, Csn1 family [Streptococcus pseudoporcinus SPIN 20026] SEQ ID NO: 179 |
| WP_002897477.1 | type II CRISPR RNA-guided endonuclease Cas9 [Streptococcus sanguinis] SEQ ID NO: 180 |
| WP_002906454.1 | type II CRISPR RNA-guided endonuclease Cas9 [Streptococcus sanguinis] SEQ ID NO: 181 |
| WP_009729476.1 | type II CRISPR RNA-guided endonuclease Cas9 [Streptococcus sp. F0441] SEQ ID NO: 182 |
| CQR24647.1 | CRISPR-associated protein [Streptococcus sp. FF10] SEQ ID NO: 183 |
| WP_000066813.1 | type II CRISPR RNA-guided endonuclease Cas9 [Streptococcus sp. M334] SEQ ID NO: 184 |
| WP_009754323.1 | type II CRISPR RNA-guided endonuclease Cas9 [Streptococcus sp. taxon 056] SEQ ID NO: 185 |
| WP_044674937.1 | type II CRISPR RNA-guided endonuclease Cas9 [Streptococcus suis] SEQ ID NO: 186 |
| WP_044676715.1 | type II CRISPR RNA-guided endonuclease Cas9 [Streptococcus suis] SEQ ID NO: 187 |
| WP_044680361.1 | type II CRISPR RNA-guided endonuclease Cas9 [Streptococcus suis] SEQ ID NO: 188 |
| WP_044681799.1 | type II CRISPR RNA-guided endonuclease Cas9 [Streptococcus suis] SEQ ID NO: 189 |
| WP_049533112.1 | CRISPR-associated protein Csn1 [Streptococcus suis] SEQ ID NO: 190 |
| WP_029090905.1 | type II CRISPR RNA-guided endonuclease Cas9 [Brochothrix thermosphacta] SEQ ID NO: 191 |
| WP_006506696.1 | type II CRISPR RNA-guided endonuclease Cas9 [Catenibacterium mitsuokai] SEQ ID NO: 192 |
| AIT42264.1 | Cas9hc:NLS:HA [Cloning vector pYB196] SEQ ID NO: 193 |
| WP_034440723.1 | type II CRISPR endonuclease Cas9 [Clostridiales bacterium S5-A11] SEQ ID NO: 194 |
| AKQ21048.1 | Cas9 [CRISPR-mediated gene targeting vector p(bhsp68-Cas9)] SEQ ID NO: 195 |
| WP_004636532.1 | type II CRISPR RNA-guided endonuclease Cas9 [Dolosigranulum pigrum] SEQ ID NO: 196 |
| WP_002364836.1 | MULTISPECIES: type II CRISPR RNA-guided endonuclease Cas9 [Enterococcus] SEQ ID NO: 197 |
| WP_016631044.1 | MULTISPECIES: type II CRISPR RNA-guided endonuclease Cas9 [Enterococcus] SEQ ID NO: 198 |
| EMS75795.1 | hypothetical protein H318_06676 [Enterococcus durans IPLA 655] SEQ ID NO: 199 |
| WP_002373311.1 | type II CRISPR RNA-guided endonuclease Cas9 [Enterococcus faecalis] SEQ ID NO: 200 |
| WP_002378009.1 | type II CRISPR RNA-guided endonuclease Cas9 [Enterococcus faecalis] SEQ ID NO: 201 |
| WP_002407324.1 | type II CRISPR RNA-guided endonuclease Cas9 [Enterococcus faecalis] SEQ ID NO: 202 |
| WP_002413717.1 | type II CRISPR RNA-guided endonuclease Cas9 [Enterococcus faecalis] SEQ ID NO: 203 |
| WP_010775580.1 | type II CRISPR RNA-guided endonuclease Cas9 [Enterococcus faecalis] SEQ ID NO: 204 |
| WP_010818269.1 | type II CRISPR RNA-guided endonuclease Cas9 [Enterococcus faecalis] SEQ ID NO: 205 |
| WP_010824395.1 | type II CRISPR RNA-guided endonuclease Cas9 [Enterococcus faecalis] SEQ ID NO: 206 |
| WP_016622645.1 | type II CRISPR RNA-guided endonuclease Cas9 [Enterococcus faecalis] SEQ ID NO: 207 |
| WP_033624816.1 | type II CRISPR RNA-guided endonuclease Cas9 [Enterococcus faecalis] SEQ ID NO: 208 |
| WP_033625576.1 | type II CRISPR RNA-guided endonuclease Cas9 [Enterococcus faecalis] SEQ ID NO: 209 |
| WP_033789179.1 | type II CRISPR RNA-guided endonuclease Cas9 [Enterococcus faecalis] SEQ ID NO: 210 |
| WP_002310644.1 | type II CRISPR RNA-guided endonuclease Cas9 [Enterococcus faecium] SEQ ID NO: 211 |
| WP_002312694.1 | type II CRISPR RNA-guided endonuclease Cas9 [Enterococcus faecium] SEQ ID NO: 212 |
| WP_002314015.1 | type II CRISPR RNA-guided endonuclease Cas9 [Enterococcus faecium] SEQ ID NO: 213 |
| WP_002320716.1 | type II CRISPR RNA-guided endonuclease Cas9 [Enterococcus faecium] SEQ ID NO: 214 |
| WP_002330729.1 | type II CRISPR RNA-guided endonuclease Cas9 [Enterococcus faecium] SEQ ID NO: 215 |
| WP_002335161.1 | type II CRISPR RNA-guided endonuclease Cas9 [Enterococcus faecium] SEQ ID NO: 216 |
| WP_002345439.1 | type II CRISPR RNA-guided endonuclease Cas9 [Enterococcus faecium] SEQ ID NO: 217 |
| WP_034867970.1 | type II CRISPR RNA-guided endonuclease Cas9 [Enterococcus faecium] SEQ ID NO: 218 |
| WP_047937432.1 | type II CRISPR RNA-guided endonuclease Cas9 [Enterococcus faecium] SEQ ID NO: 219 |
| WP_010720994.1 | type II CRISPR RNA-guided endonuclease Cas9 [Enterococcus hirae] SEQ ID NO: 220 |
| WP_010737004.1 | type II CRISPR RNA-guided endonuclease Cas9 [Enterococcus hirae] SEQ ID NO: 221 |
| WP_034700478.1 | type II CRISPR RNA-guided endonuclease Cas9 [Enterococcus hirae] SEQ ID NO: 222 |
| WP_007209003.1 | type II CRISPR RNA-guided endonuclease Cas9 [Enterococcus italicus] SEQ ID NO: 223 |
| WP_023519017.1 | type II CRISPR RNA-guided endonuclease Cas9 [Enterococcus mundtii] SEQ ID NO: 224 |
| WP_010770040.1 | type II CRISPR RNA-guided endonuclease Cas9 [Enterococcus phoeniculicola] SEQ ID NO: 225 |
| WP_048604708.1 | type II CRISPR RNA-guided endonuclease Cas9 [Enterococcus sp. AM1] SEQ ID NO: 226 |
| WP_010750235.1 | type II CRISPR RNA-guided endonuclease Cas9 [Enterococcus villorum] SEQ ID NO: 227 |
| AII16583.1 | Cas9 endonuclease [Expression vector pCas9] SEQ ID NO: 228 |
| WP_029073316.1 | type II CRISPR RNA-guided endonuclease Cas9 [Kandleria vitulina] SEQ ID NO: 229 |
| WP_031589969.1 | type II CRISPR RNA-guided endonuclease Cas9 [Kandleria vitulina] SEQ ID NO: 230 |
| KDA45870.1 | CRISPR-associated protein Cas9/Csn1, subtype II/NMEMI [Lactobacillus animalis] SEQ ID NO: 231 |
| WP_039099354.1 | type II CRISPR RNA-guided endonuclease Cas9 [Lactobacillus curvatus] SEQ ID NO: 232 |
| AKP02966.1 | hypothetical protein ABB45_04605 [Lactobacillus farciminis] SEQ ID NO: 233 |
| WP_010991369.1 | type II CRISPR RNA-guided endonuclease Cas9 [Listeria innocua] SEQ ID NO: 234 |
| WP_033838504.1 | type II CRISPR RNA-guided endonuclease Cas9 [Listeria innocua] SEQ ID NO: 235 |
| EHN60060.1 | CRISPR-associated protein, Csn1 family [Listeria innocua ATCC 33091] SEQ ID NO: 236 |
| EFR89594.1 | crispr-associated protein, Csn1 family [Listeria innocua FSL S4-378] SEQ ID NO: 237 |
| WP_038409211.1 | type II CRISPR RNA-guided endonuclease Cas9 [Listeria ivanovii] SEQ ID NO: 238 |
| EFR95520.1 | crispr-associated protein Csn1 [Listeria ivanovii FSL F6-596] SEQ ID NO: 239 |
| WP_003723650.1 | type II CRISPR RNA-guided endonuclease Cas9 [Listeria monocytogenes] SEQ ID NO: 240 |
| WP_003727705.1 | type II CRISPR RNA-guided endonuclease Cas9 [Listeria monocytogenes] SEQ ID NO: 241 |
| WP_003730785.1 | type II CRISPR RNA-guided endonuclease Cas9 [Listeria monocytogenes] SEQ ID NO: 242 |
| WP_003733029.1 | type II CRISPR RNA-guided endonuclease Cas9 [Listeria monocytogenes] SEQ ID NO: 243 |
| WP_003739838.1 | type II CRISPR RNA-guided endonuclease Cas9 [Listeria monocytogenes] SEQ ID NO: 244 |
| WP_014601172.1 | type II CRISPR RNA-guided endonuclease Cas9 [Listeria monocytogenes] SEQ ID NO: 245 |
| WP_023548323.1 | type II CRISPR RNA-guided endonuclease Cas9 [Listeria monocytogenes] SEQ ID NO: 246 |
| WP_031665337.1 | type II CRISPR RNA-guided endonuclease Cas9 [Listeria monocytogenes] SEQ ID NO: 247 |
| WP_031669209.1 | type II CRISPR RNA-guided endonuclease Cas9 [Listeria monocytogenes] SEQ ID NO: 248 |
| WP_033920898.1 | type II CRISPR RNA-guided endonuclease Cas9 [Listeria monocytogenes] SEQ ID NO: 249 |
| AKI42028.1 | CRISPR-associated protein [Listeria monocytogenes] SEQ ID NO: 250 |
| AKI50529.1 | CRISPR-associated protein [Listeria monocytogenes] SEQ ID NO: 251 |
| EFR83390.1 | crispr-associated protein Csn1 [Listeria monocytogenes FSL F2-208] SEQ ID NO: 252 |
| WP_046323366.1 | type II CRISPR RNA-guided endonuclease Cas9 [Listeria seeligeri] SEQ ID NO: 253 |
| AKE81011.1 | Cas9 [Plant multiplex genome editing vector pYLCRISPR/Cas9Pubi-H] SEQ ID NO: 254 |
| CUO82355.1 | Uncharacterized protein conserved in bacteria [Roseburia hominis] SEQ ID NO: 255 |
| WP_033162887.1 | type II CRISPR RNA-guided endonuclease Cas9 [Sharpea azabuensis] SEQ ID NO: 256 |
| AGZ01981.1 | Cas9 endonuclease [synthetic construct] SEQ ID NO: 257 |
| AKA60242.1 | nuclease deficient Cas9 [synthetic construct] SEQ ID NO: 258 |
| AKS40380.1 | Cas9 [Synthetic plasmid pFC330] SEQ ID NO: 259 |
| 4UN5_B | Cas9, Chain B, Crystal Structure SEQ ID NO: 260 |

[0202] Non-limiting examples of suitable deaminase domains are provided.

Human AID
(SEQ ID NO: 303)
[sequence omitted]
(underline: nuclear localization signal; double underline: nuclear export
signal)
Mouse AID
(SEQ ID NO: 271)
MDSLLMKQKKFLYHFKNVRWAKGRHETYLCYVVKRRDSATSCSLDFGHLRNKSGCHVELLFLRYISD
WDLDPGRCYRVTWFTSWSPCYDCARHVAEFLRWNPNLSLRIFTARLYFCEDRKAEPEGLRRLHRAGV
QIGIMTFKDYFYCWNTFVENRERTFKAWEGLHENSVRLTRQLRRILLPLYEVDDLRDAFRMLGF
(underline: nuclear localization signal; double underline: nuclear export
signal)
Dog AID
(SEQ ID NO: 272)
MDSLLMKQRKFLYHFKNVRWAKGRHETYLCYVVKRRDSATSFSLDFGHLRNKSGCHVELLFLRYISD
WDLDPGRCYRVTWFTSWSPCYDCARHVADFLRGYPNLSLRIFAARLYFCEDRKAEPEGLRRLHRAGV
QIAIMTFKDYFYCWNTFVENREKTFKAWEGLHENSVRLSRQLRRILLPLYEVDDLRDAFRTLGL
(underline: nuclear localization signal; double underline: nuclear export
signal)
Bovine AID
(SEQ ID NO: 273)
MDSLLKKQRQFLYQFKNVRWAKGRHETYLCYVVKRRDSPTSFSLDFGHLRNKAGCHVELLFLRYISD
WDLDPGRCYRVTWFTSWSPCYDCARHVADFLRGYPNLSLRIFTARLYFCDKERKAEPEGLRRLHRAG
VQIAIMTFKDYFYCWNTFVENHERTFKAWEGLHENSVRLSRQLRRILLPLYEVDDLRDAFRTLGL
(underline: nuclear localization signal; double underline: nuclear export
signal)
Rat AID
(SEQ ID NO: 2483)
MAVGSKPKAALVGPHWERERIWCFLCSTGLGTQQTGQTSRWLRPAATQDPVSPPRSLLMKQRKFLYH
FKNVRWAKGRHETYLCYVVKRRDSATSFSLDFGYLRNKSGCHVELLFLRYISDWDLDPGRCYRVTWF
TSWSPCYDCARHVADFLRGNPNLSLRIFTARLTGWGALPAGLMSPARPSDYFYCWNTFVENHERTFKA
WEGLHENSVRLSRRLRRILLPLYEVDDLRDAFRTLGL
Mouse APOBEC-3
(SEQ ID NO: 274)
MGPFCLGCSHRKCYSPIRNLISQETFKFHFKNLGYAKGRKDTFLCYEVTRKDCDSPVSLHHGVFKNKD
NIHAEICFLYWFHDKVLKVLSPREEFKITWYMSWSPCFECAEQIVRFLATHHNLSLDIFSSRLYNVQDPETQ
QNLCRLVQEGAQVAAMDLYEFKKCWKKFVDNGGRRFRPWKRLLTNFRYQDSKLQEILRPCYIPVPSS
SSSTLSNICLTKGLPETRFCVEGRRMDPLSEEEFYSQFYNQRVKHLCYYHRMKPYLCYQLEQFNGQAPL
KGCLLSEKGKQHAEILFLDKIRSMELSQVTITCYLTWSPCPNCAWQLAAFKRDRPDLILHIYTSRLYFHWK
RPFQKGLCSLWQSGILVDVMDLPQFTDCWTNFVNPKRPFWPWKGLEIISRRTQRRLRRIKESWGLQDL
VNDFGNLQLGPPMS (italic: nucleic acid editing domain)
Rat APOBEC-3
(SEQ ID NO: 275)
MGPFCLGCSHRKCYSPIRNLISQETFKFHFKNLRYAIDRKDTFLCYEVTRKDCDSPVSLHHGVFKNKDN
IHAEICFLYWFHDKVLKVLSPREEFKITWYMSWSPCFECAEQVLRFLATHHNLSLDIFSSRLYNIRDPENQQ
NLCRLVQEGAQVAAMDLYEFKKCWKKFVDNGGRRFRPWKKLLTNFRYQDSKLQEILRPCYIPVPSSSS
STLSNICLTKGLPETRFCVERRRVHLLSEEEFYSQFYNQRVKHLCYYHGVKPYLCYQLEQFNGQAPLKG
CLLSEKGKQHAEILFLDKIRSMELSQVIITCYLTWSPCPNCAWQLAAFKRDRPDLILHIYTSRLYFHWKRPF
QKGLCSLWQSGILVDVMDLPQFTDCWTNFVNPKRPFWPWKGLEIISRRTQRRLHRIKESWGLQDLVND
FGNLQLGPPMS (italic: nucleic acid editing domain)
Rhesus macaque APOBEC-3G
(SEQ ID NO: 276)
MVEPMDPRTFVSNFNNRPILSGLNTVWLCCEVKTKDPSGPPLDAKIFQGKVYSKAKYHPEMRFLRWFH
KWRQLHHDQEYKVTWYVSWSPCTRCANSVATFLAKDPKVTLTIFVARLYYFWKPDYQQALRILCQKRG
GPHATMKIMNYNEFQDCWNKFVDGRGKPFKPRNNLPKHYTLLQATLGELLRHLMDPGTFTSNFNNKP
WVSGQHETYLCYKVERLHNDTWVPLNQHRGFLRNQAPNIHGFPKGRHAELCFLDLIPFWKLDGQQYRV
TCFTSWSPCFSCAQEMAKFISNNEHVSLCIFAARIYDDQGRYQEGLRALHRDGAKIAMMNYSEFEYCW
DTFVDRQGRPFQPWDGLDEHSQALSGRLRAI (italic: nucleic acid editing domain;
underline: cytoplasmic localization signal)
Chimpanzee APOBEC-3G
(SEQ ID NO: 277)
MKPHFRNPVERMYQDTFSDNFYNRPILSHRNTVWLCYEVKTKGPSRPPLDAKIFRGQVYSKLKYHPEM
RFFHWFSKWRKLHRDQEYEVTWYISWSPCTKCTRDVATFLAEDPKVTLTIFVARLYYFWDPDYQEALRS
LCQKRDGPRATMKIMNYDEFQHCWSKFVYSQRELFEPWNNLPKYYILLHIMLGEILRHSMDPPTFTSN
FNNELWVRGRHETYLCYEVERLHNDTWVLLNQRRGFLCNQAPHKHGFLEGRHAELCFLDVIPFWKLD
LHQDYRVTCFTSWSPCFSCAQEMAKFISNNKHVSLCIFAARIYDDQGRCQEGLRTLAKAGAKISIMTYSE
FKHCWDTFVDHQGCPFQPWDGLEEHSQALSGRLRAILQNQGN (italic: nucleic acid
editing domain; underline: cytoplasmic localization signal)
Green monkey APOBEC-3G
(SEQ ID NO: 278)
MNPQIRNMVEQMEPDIFVYYFNNRPILSGRNTVWLCYEVKTKDPSGPPLDANIFQGKLYPEAKDHPEM
KFLHWFRKWRQLHRDQEYEVTWYVSWSPCTRCANSVATFLAEDPKVTLTIFVARLYYFWKPDYQQALRI
LCQERGGPHATMKIMNYNEFQHCWNEFVDGQGKPFKPRKNLPKHYTLLHATLGELLRHVMDPGTFTS
NFNNKPWVSGQRETYLCYKVERSHNDTWVLLNQHRGFLRNQAPDRHGFPKGRHAELCFLDLIPFWKL
DDQQYRVTCFTSWSPCFSCAQKMAKFISNNKHVSLCIFAARIYDDQGRCQEGLRTLHRDGAKIAVMNYS
EFEYCWDTFVDRQGRPFQPWDGLDEHSQALSGRLRAI (italic: nucleic acid editing
domain; underline: cytoplasmic localization signal)
Human APOBEC-3G
(SEQ ID NO: 279)
MKPHFRNTVERMYRDTFSYNFYNRPILSRRNTVWLCYEVKTKGPSRPPLDAKIFRGQVYSELKYHPEM
RFFHWFSKWRKLHRDQEYEVTWYISWSPCTKCTRDMATFLAEDPKVTLTIFVARLYYFWDPDYQEALRS
LCQKRDGPRATMKIMNYDEFQHCWSKFVYSQRELFEPWNNLPKYYILLHIMLGEILRHSMDPPTFTFN
FNNEPWVRGRHETYLCYEVERMHNDTWVLLNQRRGFLCNQAPHKHGFLEGRHAELCFLDVIPFWKLD
LDQDYRVTCFTSWSPCFSCAQEMAKFISKNKHVSLCIFTARIYDDQGRCQEGLRTLAEAGAKISIMTYSE
FKHCWDTFVDHQGCPFQPWDGLDEHSQDLSGRLRAILQNQEN (italic: nucleic acid
editing domain; underline: cytoplasmic localization signal)
Human APOBEC-3F
(SEQ ID NO: 280)
MKPHFRNTVERMYRDTFSYNFYNRPILSRRNTVWLCYEVKTKGPSRPRLDAKIFRGQVYSQPEHHAEM
CFLSWFCGNQLPAYKCFQITWFVSWTPCPDCVAKLAEFLAEHPNVTLTISAARLYYYWERDYRRALCRL
SQAGARVKIMDDEEFAYCWENFVYSEGQPFMPWYKFDDNYAFLHRTLKEILRNPMEAMYPHIFYFHF
KNLRKAYGRNESWLCFTMEVVKHHSPVSWKRGVFRNQVDPETHCHAERCFLSWFCDDILSPNTNYEVT
WYTSWSPCPECAGEVAEFLARHSNVNLTIFTARLYYFWDTDYQEGLRSLSQEGASVEIMGYKDFKYCW
ENFVYNDDEPFKPWKGLKYNFLFLDSKLQEILE (italic: nucleic acid editing domain)
Human APOBEC-3B
(SEQ ID NO: 281)
MNPQIRNPMERMYRDTFYDNFENEPILYGRSYTWLCYEVKIKRGRSNLLWDTGVFRGQVYFKPQYHA
EMCFLSWFCGNQLPAYKCFQITWFVSWTPCPDCVAKLAEFLSEHPNVTLTISAARLYYYWERDYRRALC
RLSQAGARVTIMDYEEFAYCWENFVYNEGQQFMPWYKFDENYAFLHRTLKEILRYLMDPDTFTFNFN
NDPLVLRRRQTYLCYEVERLDNGTWVLMDQHMGFLCNEAKNLLCGFYGRHAELRFLDLVPSLQLDPA
QIYRVTWFISWSPCFSWGCAGEVRAFLQENTHVRLRIFAARIYDYDPLYKEALQMLRDAGAQVSIMTYD
EFEYCWDTFVYRQGCPFQPWDGLEEHSQALSGRLRAILQNQGN (italic: nucleic acid
editing domain)
Rat APOBEC-3B:
(SEQ ID NO: 2484)
MQPQGLGPNAGMGPVCLGCSHRRPYSPIRNPLKKLYQQTFYFHFKNVRYAWGRKNNFLCYEVNGMD
CALPVPLRQGVFRKQGHIHAELCFIYWFHDKVLRVLSPMEEFKVTWYMSWSPCSKCAEQVARFLAAH
RNLSLAIFSSRLYYYLRNPNYQQKLCRLIQEGVHVAAMDLPEFKKCWNKFVDNDGQPFRPWMRLRINF
SFYDCKLQEIFSRMNLLREDVFYLQFNNSHRVKPVQNRYYRRKSYLCYQLERANGQEPLKGYLLYKK
GEQHVEILFLEKMRSMELSQVRITCYLTWSPCPNCARQLAAFKKDHPDLILRIYTSRLYFYWRKKFQKG
LCTLWRSGIHVDVMDLPQFADCWTNFVNPQRPFRPWNELEKNSWRIQRRLRRIKESWGL
Bovine APOBEC-3B:
(SEQ ID NO: 2485)
DGWEVAFRSGTVLKAGVLGVSMTEGWAGSGHPGQGACVWTPGTRNTMNLLREVLFKQQFGNQPRV
PAPYYRRKTYLCYQLKQRNDLTLDRGCFRNKKQRHAEIRFIDKINSLDLNPSQSYKIICYITWSPCPNCA
NELVNFITRNNHLKLEIFASRLYFHWIKSFKMGLQDLQNAGISVAVMTHTEFEDCWEQFVDNQSRPFQP
WDKLEQYSASIRRRLQRILTAPI
Chimpanzee APOBEC-3B:
(SEQ ID NO: 2486)
MNPQIRNPMEWMYQRTFYYNFENEPILYGRSYTWLCYEVKIRRGHSNLLWDTGVFRGQMYSQPEHH
AEMCFLSWFCGNQLSAYKCFQITWFVSWTPCPDCVAKLAKFLAEHPNVTLTISAARLYYYWERDYRR
ALCRLSQAGARVKIMDDEEFAYCWENFVYNEGQPFMPWYKFDDNYAFLHRTLKEIIRHLMDPDTFTF
NFNNDPLVLRRHQTYLCYEVERLDNGTWVLMDQHMGFLCNEAKNLLCGFYGRHAELRFLDLVPSLQ
LDPAQIYRVTWFISWSPCFSWGCAGQVRAFLQENTHVRLRIFAARIYDYDPLYKEALQMLRDAGAQVS
IMTYDEFEYCWDTFVYRQGCPFQPWDGLEEHSQALSGRLRAILQVRASSLCMVPHRPPPPPQSPGPCLP
LCSEPPLGSLLPTGRPAPSLPFLLTASFSFPPPASLPPLPSLSLSPGHLPVPSFHSLTSCSIQPPCSSRIRETEG
WASVSKEGRDLG
Human APOBEC-3C:
(SEQ ID NO: 282)
MNPQIRNPMKAMYPGTFYFQFKNLWEANDRNETWLCFTVEGIKRRSVVSWKTGVFRNQVDSETHCH
AERCFLSWFCDDILSPNTKYQWWYTSWSPCPDCAGEVAEFLARHSNVNLTIFTARLYYFQYPCYQEGLR
SLSQEGVAVEIMDYEDFKYCWENFVYNDNEPFKPWKGLKTNFRLLKRRLRESLQ
(italic: nucleic acid editing domain)
Gorilla APOBEC3C:
(SEQ ID NO: 2487)
MNPQIRNPMKAMYPGTFYFQFKNLWEANDRNETWLCFTVEGIKRRSVVSWKTGVFRNQVDSETHCH
AERCFLSWFCDDILSPNTNYQVTWYTSWSPCPECAGEVAEFLARHSNVNLTIFTARLYYFQDTDYQEG
LRSLSQEGVAVKIMDYKDFKYCWENFVYNDDEPFKPWKGLKYNFRFLKRRLQEILE
Human APOBEC-3A:
(SEQ ID NO: 283)
MEASPASGPRHLMDPHIFTSNFNNGIGRHKTYLCYEVERLDNGTSVKMDQHRGFLHNQAKNLLCGFY
GRHAELRFLDLVPSLQLDPAQIYRWWFISWSPCFSWGCAGEVRAFLQENTHVRLRIFAARIYDYDPLYKE
ALQMLRDAGAQVSIMTYDEFKHCWDTFVDHQGCPFQPWDGLDEHSQALSGRLRAILQNQGN
(italic: nucleic acid editing domain)
Rhesus macaque APOBEC-3A:
(SEQ ID NO: 2488)
MDGSPASRPRHLMDPNTFTFNFNNDLSVRGRHQTYLCYEVERLDNGTWVPMDERRGFLCNKAKNVP
CGDYGCHVELRFLCEVPSWQLDPAQTYRVTWFISWSPCFRRGCAGQVRVFLQENKHVRLRIFAARIYD
YDPLYQEALRTLRDAGAQVSIMTYEEFKHCWDTFVDRQGRPFQPWDGLDEHSQALSGRLRAILQNQG
N
Bovine APOBEC-3A:
(SEQ ID NO: 2489)
MDEYTFTENFNNQGWPSKTYLCYEMERLDGDATIPLDEYKGFVRNKGLDQPEKPCHAELYFLGKIHS
WNLDRNQHYRLTCFISWSPCYDCAQKLTTFLKENHHISLHILASRIYTHNRFGCHQSGLCELQAAGARI
TIMTFEDFKHCWETFVDHKGKPFQPWEGLNVKSQALCTELQAILKTQQN
Human APOBEC-3H:
(SEQ ID NO: 284)
MALLTAETFRLQFNNKRRLRRPYYPRKALLCYQLTPQNGSTPTRGYFENKKKCHAEICHNEIKSMGLD
ETQCYQVTCYLTWSPCSSCAWELVDFIKAHDHLNLGIFASRLYYHWCKPQQKGLRLLCGSQVPVEVMG
FPKFADCWENFVDHEKPLSFNPYKMLEELDKNSRAIKRRLERIKIPGVRAQGRYMDILCDAEV
(italic: nucleic acid editing domain)
Rhesus macaque APOBEC-3H:
(SEQ ID NO: 2490)
MALLTAKTFSLQFNNKRRVNKPYYPRKALLCYQLTPQNGSTPTRGHLKNKKKDHAEIRFINKIKSMGL
DETQCYQVTCYLTWSPCPSCAGELVDFIKAHRHLNLRIFASRLYYHWRPNYQEGLLLLCGSQVPVEVM
GLPEFTDCWENFVDHKEPPSFNPSEKLEELDKNSQAIKRRLERIKSRS VDVLENGLRS LQLGPVTPS S SIR
NSR
Human APOBEC-3D
(SEQ ID NO: 285)
MNPQIRNPMERMYRDTFYDNFENEPILYGRSYTWLCYEVKIKRGRSNLLWDTGVFRGPVLPKRQSNH
RQEVYFRFENHAEMCFLSWFCGNRLPANRRFQITWFVSWNPCLPCVVKVTKFLAEHPNVTLTISAARLY
YYRDRDWRWVLLRLHKAGARVKIMDYEDFAYCWENFVCNEGQPFMPWYKFDDNYASLHRTLKEIL
RNPMEAMYPHIFYFHFKNLLKACGRNESWLCFTMEVTKHHSAVFRKRGVFRNQVDPETHCHAERCFL
SWFCDDILSPNTNYEVTWYTSWSPCPECAGEVAEFLARHSNVNLTIFTARLCYFWDTDYQEGLCSLSQEG
ASVKIMGYKDFVSCWKNFVYSDDEPFKPWKGLQTNFRLLKRRLREILQ (italic:
nucleic acid editing domain)
Human APOBEC-1
(SEQ ID NO: 286)
MTSEKGPSTGDPTLRRRIEPWEFDVFYDPRELRKEACLLYEIKWGMSRKIWRSSGKNTTNHVEVNFIKK
FTSERDFHPSMSCSITWFLSWSPCWECSQAIREFLSRHPGVTLVIYVARLFWHMDQQNRQGLRDLVNS
GVTIQIMRASEYYHCWRNFVNYPPGDEAHWPQYPPLWMMLYALELHCIILSLPPCLKISRRWQNHLTF
FRLHLQNCHYQTIPPHILLATGLIHPSVAWR
Mouse APOBEC-1
(SEQ ID NO: 287)
mSSETGPVAVDPTLRRRIEPHEFEVFFDPRELRKETCLLYEINWGGRHSVWRHTSQNTSNHVEVNFLEK
FTTERYFRPNTRCSITWFLSWSPCGECSRAITEFLSRHPYVTLFIYIARLYHHTDQRNRQGLRDLISSGVTI
QIMTEQEYCYCWRNFVNYPPSNEAYWPRYPHLWVKLYVLELYCIILGLPPCLKILRRKQPQLTFFTITL
QTCHYQRIPPHLLWATGLK
Rat APOBEC-1
(SEQ ID NO: 288)
[sequence omitted]
Human APOBEC-2:
(SEQ ID NO: 2491)
MAQKEEAAVATEAASQNGEDLENLDDPEKLKELIELPPFEIVTGERLPANFFKFQFRNVEYSSGRNKTF
LCYVVEAQGKGGQVQASRGYLEDEHAAAHAEEAFFNTILPAFDPALRYNVTWYVSSSPCAACADRIIK
TLSKTKNLRLLILVGRLFMWEEPEIQAALKKLKEAGCKLRIMKPQDFEYVWQNFVEQEEGESKAFQPW
EDIQENFLYYEEKLADILK
Mouse APOBEC-2:
(SEQ ID NO: 2492)
MAQKEEAAEAAAPASQNGDDLENLEDPEKLKELIDLPPFEIVTGVRLPVNFFKFQFRNVEYSSGRNKTF
LCYVVEVQSKGGQAQATQGYLEDEHAGAHAEEAFFNTILPAFDPALKYNVTWYVSSSPCAACADRIL
KTLSKTKNLRLLILVSRLFMWEEPEVQAALKKLKEAGCKLRIMKPQDFEYIWQNFVEQEEGESKAFEP
WEDIQENFLYYEEKLADILK
Rat APOBEC-2:
(SEQ ID NO: 2493)
MAQKEEAAEAAAPASQNGDDLENLEDPEKLKELIDLPPFEIVTGVRLPVNFFKFQFRNVEYSSGRNKTF
LCYVVEAQSKGGQVQATQGYLEDEHAGAHAEEAFFNTILPAFDPALKYNVTWYVSSSPCAACADRIL
KTLSKTKNLRLLILVSRLFMWEEPEVQAALKKLKEAGCKLRIMKPQDFEYLWQNFVEQEEGESKAFEP
WEDIQENFLYYEEKLADILK
Bovine APOBEC-2:
(SEQ ID NO: 2494)
MAQKEEAAAAAEPASQNGEEVENLEDPEKLKELIELPPFEIVTGERLPAHYFKFQFRNVEYSSGRNKTF
LCYVVEAQSKGGQVQASRGYLEDEHATNHAEEAFFNSIMPTFDPALRYMVTWYVSSSPCAACADRIV
KTLNKTKNLRLLILVGRLFMWEEPEIQAALRKLKEAGCRLRIMKPQDFEYIWQNFVEQEEGESKAFEP
WEDIQENFLYYEEKLADILK
Petromyzon marinus CDA1 (pmCDA1)
(SEQ ID NO: 289)
MTDAEYVRIHEKLDIYTFKKQFFNNKKSVSHRCYVLFELKRRGERRACFWGYAVNKPQSGTERGIHAE
IFSIRKVEEYLRDNPGQFTINWYSSWSPCADCAEKILEWYNQELRGNGHTLKIWACKLYYEKNARNQI
GLWNLRDNGVGLNVMVSEHYQCCRKIFIQSSHNQLNENRWLEKTLKRAEKRRSELSIMIQVKILHTTK
SPAV
Human APOBEC3G D316R_D317R
(SEQ ID NO: 290)
MKPHFRNTVERMYRDTFSYNFYNRPILSRRNTVWLCYEVKTKGPSRPPLDAKIFRGQVYSELKYHPEM
RFFHWFSKWRKLHRDQEYEVTWYISWSPCTKCTRDMATFLAEDPKVTLTIFVARLYYFWDPDYQEAL
RSLCQKRDGPRATMKIMNYDEFQHCWSKFVYSQRELFEPWNNLPKYYILLHIMLGEILRHSMDPPTFTF
NFNNEPWVRGRHETYLCYEVERMHNDTWVLLNQRRGFLCNQAPHKHGFLEGRHAELCFLDVIPFWK
LDLDQDYRVTCFTSWSPCFSCAQEMAKFISKNKHVSLCIFTARIYRRQGRCQEGLRTLAEAGAKISIMT
YSEFKHCWDTFVDHQGCPFQPWDGLDEHSQDLSGRLRAILQNQEN
Human APOBEC3G chain A
(SEQ ID NO: 291)
MDPPTFTFNFNNEPWVRGRHETYLCYEVERMHNDTWVLLNQRRGFLCNQAPHKHGFLEGRHAELCFL
DVIPFWKLDLDQDYRVTCFTSWSPCFSCAQEMAKFISKNKHVSLCIFTARIYDDQGRCQEGLRTLAEAG
AKISIMTYSEFKHCWDTFVDHQGCPFQPWDGLDEHSQDLSGRLRAILQ
Human APOBEC3G chain A D120R_D121R
(SEQ ID NO: 292)
MDPPTFTFNFNNEPWVRGRHETYLCYEVERMHNDTWVLLNQRRGFLCNQAPHKHGFLEGRHAELCFL
DVIPFWKLDLDQDYRVTCFTSWSPCFSCAQEMAKFISKNKHVSLCIFTARIYRRQGRCQEGLRTLAEAG
AKISIMTYSEFKHCWDTFVDHQGCPFQPWDGLDEHSQDLSGRLRAILQ
Non-limiting examples of fusion proteins/nucleobase editors are provided.
His₆-rAPOBEC1-XTEN-dCas9 for Escherichia coli expression
(SEQ ID NO: 293)
MGSSHHHHHHMSSETGPVAVDPTLRRRIEPHEFEVFFDPRELRKETCLLYEINWGGRHSIWRHTSQNTN
KHVEVNFIEKFTTERYFCPNTRCSITWFLSWSPCGECSRAITEFLSRYPHVTLFIYIARLYHHADPRNRQG
LRDLISSGVTIQIMTEQESGYCWRNFVNYSPSNEAHWPRYPHLWVRLYVLELYCIILGLPPCLNILRRKQ
PQLTFFTIALQSCHYQRLPPHILWATGLKSGSETPGTSESATPESDKKYSIGLAIGTNSVGWAVITDEYK
VPSKKFKVLGNTDRHSIKKNLIGALLFDSGETAEATRLKRTARRRYTRRKNRICYLQEIFSNEMAKVDD
SFFHRLEESFLVEEDKKHERHPIFGNIVDEVAYHEKYPTIYHLRKKLVDSTDKADLRLIYLALAHMIKFR
GHFLIEGDLNPDNSDVDKLFIQLVQTYNQLFEENPINASGVDAKAILSARLSKSRRLENLIAQLPGEKKN
GLFGNLIALSLGLTPNFKSNFDLAEDAKLQLSKDTYDDDLDNLLAQIGDQYADLFLAAKNLSDAILLSD
ILRVNTEITKAPLSASMIKRYDEHHQDLTLLKALVRQQLPEKYKEIFFDQSKNGYAGYIDGGASQEEFY
KFIKPILEKMDGTEELLVKLNREDLLRKQRTFDNGSIPHQIHLGELHAILRRQEDFYPFLKDNREKIEKIL
TFRIPYYVGPLARGNSRFAWMTRKSEETITPWNFEEVVDKGASAQSFIERMTNFDKNLPNEKVLPKHSL
LYEYFTVYNELTKVKYVTEGMRKPAFLSGEQKKAIVDLLFKTNRKVTVKQLKEDYFKKIECFDSVEIS
GVEDRFNASLGTYHDLLKIIKDKDFLDNEENEDILEDIVLTLTLFEDREMIEERLKTYAHLFDDKVMKQ
LKRRRYTGWGRLSRKLINGIRDKQSGKTILDFLKSDGFANRNFMQLIHDDSLTFKEDIQKAQVSGQGDS
LHEHIANLAGSPAIKKGILQTVKVVDELVKVMGRHKPENIVIEMARENQTTQKGQKNSRERMKRIEEGI
KELGSQILKEHPVENTQLQNEKLYLYYLQNGRDMYVDQELDINRLSDYDVDAIVPQSFLKDDSIDNKV
LTRSDKNRGKSDNVPSEEVVKKMKNYWRQLLNAKLITQRKFDNLTKAERGGLSELDKAGFIKRQLVE
TRQITKHVAQILDSRMNTKYDENDKLIREVKVITLKSKLVSDFRKDFQFYKVREINNYHHAHDAYLNA
VVGTALIKKYPKLESEFVYGDYKVYDVRKMIAKSEQEIGKATAKYFFYSNIMNFFKTEITLANGEIRKR
PLIETNGETGEIVWDKGRDFATVRKVLSMPQVNIVKKTEVQTGGFSKESILPKRNSDKLIARKKDWDPK
KYGGFDSPTVAYSVLVVAKVEKGKSKKLKSVKELLGITIMERSSFEKNPIDFLEAKGYKEVKKDLIIKLP
KYSLFELENGRKRMLASAGELQKGNELALPSKYVNFLYLASHYEKLKGSPEDNEQKQLFVEQHKHYL
DEIIEQISEFSKRVILADANLDKVLSAYNKHRDKPIREQAENIIHLFTLTNLGAPAAFKYFDTTIDRKRYT
STKEVLDATLIHQSITGLYETRIDLSQLGGDSGGSPKKKRKV
rAPOBEC1-XTEN-dCas9-NLS for mammalian expression
(SEQ ID NO: 294)
MSSETGPVAVDPTLRRRIEPHEFEVFFDPRELRKETCLLYEINWGGRHSIWRHTSQNTNKHVEVNFIEKF
TTERYFCPNTRCSITWFLSWSPCGECSRAITEFLSRYPHVTLFIYIARLYHHADPRNRQGLRDLISSGVTI
QIMTEQESGYCWRNFVNYSPSNEAHWPRYPHLWVRLYVLELYCIILGLPPCLNILRRKQPQLTFFTIALQ
SCHYQRLPPHILWATGLKSGSETPGTSESATPESDKKYSIGLAIGTNSVGWAVITDEYKVPSKKFKVLG
NTDRHSIKKNLIGALLFDSGETALATRLKRTARRRYTRRKNRICYLQEIFSNEMAKVDDSFFHRLEESFL
VEEDKKHERHPIFGNIVDEVAYHEKYPTIYHLRKKLVDSTDKADLRLIYLALAHMIKFRGHFLIEGDLN
PDNSDVDKLFIQLVQTYNQLFEENPINASGVDAKAILSARLSKSRRLENLIAQLPGEKKNGLFGNLIALS
LGLTPNFKSNFDLAEDAKLQLSKDTYDDDLDNLLAQIGDQYADLFLAAKNLSDAILLSDILRVNTEITK
APLSASMIKRYDEHHQDLTLLKALVRQQLPEKYKEIFFDQSKNGYAGYIDGGASQLEFYKFIKPILEKM
DGTEELLVKLNREDLLRKQRTFDNGSIPHQIHLGELHAILRRQEDFYPFLKDNREKIEKILTFRIPYYVGP
LARGNSRFAWMTRKSEETITPWNFEEVVDKGASAQSFIERMTNFDKNLPNEKVLPKHSLLYEYFTVYN
ELTKVKYVTEGMRKPAFLSGEQKKAIVDLLFKTNRKVTVKQLKEDYFKKIECFDSVEISGVEDRFNASL
GTYHDLLKIIKDKDFLDNEENEDILEDIVLTLTLFEDREMIEERLKTYAHLFDDKVMKQLKRRRYTGWG
RLSRKLINGIRDKQSGKTILDFLKSDGFANRNFMQLIHDDSLTFKEDIQKAQVSGQGDSLHEHIANLAGS
PAIKKGILQTVKVVDELVKVMGRHKPENIVIEMARENQTTQKGQKNSRERMKRIEEGIKELGSQILKEH
PVENTQLQNEKLYLYYLQNGRDMYVDQELDINRLSDYDVDAIVPQSFLKDDSIDNKVLTRSDKNRGKS
DNVPSEEVVKKMKNYWRQLLNAKLITQRKFDNLTKAERGGLSELDKAGFIKRQLVETRQITKHVAQIL
DSRMNTKYDENDKLIREVKVITLKSKLVSDFRKDFQFYKVREINNYHHAHDAYLNAVVGTALIKKYPK
LESEFVYGDYKVYDVRKMIAKSEQEIGKATAKYFFYSNIMNFFKTEITLANGEIRKRPLIETNGETGEIV
WDKGRDFATVRKVLSMPQVNIVKKTEVQTGGFSKESILPKRNSDKLIARKKDWDPKKYGGFDSPTVA
YSVLVVAKVEKGKSKKLKSVKELLGITIMERSSFEKNPIDFLEAKGYKEVKKDLIIKLPKYSLFELENGR
KRMLASAGELQKGNELALPSKYVNFLYLASHYEKLKGSPEDNEQKQLFVEQHKHYLDEIIEQISEFSKR
VILADANLDKVLSAYNKHRDKPIREQAENIIHLFTLTNLGAPAAFKYFDTTIDRKRYTSTKEVLDATLIH
QSITGLYETRIDLSQLGGDSGGSPKKKRKV
hAPOBEC1-XTEN-dCas9-NLS for mammalian expression
(SEQ ID NO: 295)
MTSEKGPSTGDPTLRRRIEPWEFDVFYDPRELRKEACLLYEIKWGMSRKIWRSSGKNTTNHVEVNFIKK
FTSERDFHPSMSCSITWFLSWSPCWECSQAIREFLSRHPGVTLVIYVARLFWHMDQQNRQGLRDLVNS
GVTIQIMRASEYYHCWRNFVNYPPGDEAHWPQYPPLWMMLYALELHCIILSLPPCLKISRRWQNHLTF
FRLHLQNCHYQTIPPHILLATGLIHPSVAWRSGSETPGTSESATPESDKKYSIGLAIGTNSVGWAVITDEY
KVPSKKFKVLGNTDRHSIKKNLIGALLFDSGETALATRLKRTARRRYTRRKNRICYLQEIFSNEMAKVD
DSFFHRLEESFLVEEDKKHERHPIFGNIVDEVAYHEKYPTIYHLRKKLVDSTDKADLRLIYLALAHMIKF
RGHFLIEGDLNPDNSDVDKLFIQLVQTYNQLFEENPINASGVDAKAILSARLSKSRRLENLIAQLPGEKK
NGLFGNLIALSLGLTPNFKSNFDLAEDAKLQLSKDTYDDDLDNLLAQIGDQYADLFLAAKNLSDAILLS
DILRVNTEITKAPLSASMIKRYDEHHQDLTLLKALVRQQLPEKYKEIFFDQSKNGYAGYIDGGASQLEF
YKFIKPILEKMDGTEELLVKLNREDLLRKQRTFDNGSIPHQIHLGELHAILRRQEDFYPFLKDNREKIEKI
LTFRIPYYVGPLARGNSRFAWMTRKSEETITPWNFEEVVDKGASAQSFIERMTNFDKNLPNEKVLPKHS
LLYEYFTVYNELTKVKYVTEGMRKPAFLSGEQKKAIVDLLFKTNRKVTVKQLKEDYFKKIECFDSVEIS
GVEDRFNASLGTYHDLLKIIKDKDFLDNEENEDILEDIVLTLTLFEDREMIEERLKTYAHLFDDKVMKQ
LKRRRYTGWGRLSRKLINGIRDKQSGKTILDFLKSDGFANRNFMQLIHDDSLTFKEDIQKAQVSGQGDS
LHEHIANLAGSPAIKKGILQTVKVVDELVKVMGRHKPENIVIEMARENQTTQKGQKNSRERMKRIEEGI
KELGSQILKEHPVENTQLQNEKLYLYYLQNGRDMYVDQELDINRLSDYDVDAIVPQSFLKDDSIDNKV
LTRSDKNRGKSDNVPSEEVVKKMKNYWRQLLNAKLITQRKFDNLTKAERGGLSELDKAGFIKRQLVE
TRQITKHVAQILDSRMNTKYDENDKLIREVKVITLKSKLVSDFRKDFQFYKVREINNYHHAHDAYLNA
VVGTALIKKYPKLESEFVYGDYKVYDVRKMIAKSEQEIGKATAKYFFYSNIMNFFKTEITLANGEIRKR
PLIETNGETGEIVWDKGRDFATVRKVLSMPQVNIVKKTEVQTGGFSKESILPKRNSDKLIARKKDWDPK
KYGGFDSPTVAYSVLVVAKVEKGKSKKLKSVKELLGITIMERSSFEKNPIDFLEAKGYKEVKKDLIIKLP
KYSLFELENGRKRMLASAGELQKGNELALPSKYVNFLYLASHYEKLKGSPEDNEQKQLFVEQHKHYL
DEIIEQISEFSKRVILADANLDKVLSAYNKHRDKPIREQAENIIHLFTLTNLGAPAAFKYFDTTIDRKRYT
STKEVLDATLIHQSITGLYETRIDLSQLGGDSGGSPKKKRKV
rAPOBEC1-XTEN-dCas9-UGI-NLS
(SEQ ID NO: 296)
MSSETGPVAVDPTLRRRIEPHEFEVFFDPRELRKETCLLYEINWGGRHSIWRHTSQNTNKHVEVNFIEKF
TTERYFCPNTRCSITWFLSWSPCGECSRAITEFLSRYPHVTLFIYIARLYHHADPRNRQGLRDLISSGVTI
QIMTEQESGYCWRNFVNYSPSNEAHWPRYPHLWVRLYVLELYCIILGLPPCLNILRRKQPQLTFFTIALQ
SCHYQRLPPHILWATGLKSGSETPGTSESATPESDKKYSIGLAIGTNSVGWAVITDEYKVPSKKFKVLG
NTDRHSIKKNLIGALLFDSGETALATRLKRTARRRYTRRKNRICYLQEIFSNEMAKVDDSFFHRLEESFL
VEEDKKHERHPIFGNIVDEVAYHEKYPTIYHLRKKLVDSTDKADLRLIYLALAHMIKFRGHFLIEGDLN
PDNSDVDKLFIQLVQTYNQLFEENPINASGVDAKAILSARLSKSRRLENLIAQLPGEKKNGLFGNLIALS
LGLTPNFKSNFDLAEDAKLQLSKDTYDDDLDNLLAQIGDQYADLFLAAKNLSDAILLSDILRVNTEITK
APLSASMIKRYDEHHQDLTLLKALVRQQLPEKYKEIFFDQSKNGYAGYIDGGASQLEFYKFIKPILEKM
DGTEELLVKLNREDLLRKQRTFDNGSIPHQIHLGELHAILRRQEDFYPFLKDNREKIEKILTFRIPYYVGP
LARGNSRFAWMTRKSEETITPWNFEEVVDKGASAQSFIERMTNFDKNLPNEKVLPKHSLLYEYFTVYN
ELTKVKYVTEGMRKPAFLSGEQKKAIVDLLFKTNRKVTVKQLKEDYFKKIECFDSVEISGVEDRFNASL
GTYHDLLKIIKDKDFLDNEENEDILEDIVLTLTLFEDREMIEERLKTYAHLFDDKVMKQLKRRRYTGWG
RLSRKLINGIRDKQSGKTILDFLKSDGFANRNFMQLIHDDSLTFKEDIQKAQVSGQGDSLHEHIANLAGS
PAIKKGILQTVKVVDELVKVMGRHKPENIVIEMARENQTTQKGQKNSRERMKRIEEGIKELGSQILKEH
PVENTQLQNEKLYLYYLQNGRDMYVDQELDINRLSDYDVDAIVPQSFLKDDSIDNKVLTRSDKNRGKS
DNVPSEEVVKKMKNYWRQLLNAKLITQRKFDNLTKAERGGLSELDKAGFIKRQLVETRQITKHVAQIL
DSRMNTKYDENDKLIREVKVITLKSKLVSDFRKDFQFYKVREINNYHHAHDAYLNAVVGTALIKKYPK
LESEFVYGDYKVYDVRKMIAKSEQEIGKATAKYFFYSNIMNFFKTEITLANGEIRKRPLIETNGETGEIV
WDKGRDFATVRKVLSMPQVNIVKKTEVQTGGFSKESILPKRNSDKLIARKKDWDPKKYGGFDSPTVA
YSVLVVAKVEKGKSKKLKSVKELLGITIMERSSFEKNPIDFLEAKGYKEVKKDLIIKLPKYSLFELENGR
KRMLASAGELQKGNELALPSKYVNFLYLASHYEKLKGSPEDNEQKQLFVEQHKHYLDEIIEQISEFSKR
VILADANLDKVLSAYNKHRDKPIREQAENIIHLFTLTNLGAPAAFKYFDTTIDRKRYTSTKEVLDATLIH
QSITGLYETRIDLSQLGGDSGGSTNLSDIIEKETGKQLVIQESILMLPEEVEEVIGNKPESDILVHTAYDES
TDENVMLLTSDAPEYKPWALVIQDSNGENKIKMLSGGSPKKKRKV
rAPOBEC1-XTEN-Cas9 nickase-UGI-NLS
(BE3, SEQ ID NO: 297)
MSSETGPVAVDPTLRRRIEPHEFEVFFDPRELRKETCLLYEINWGGRHSIWRHTSQNTNKHVEVNFIEKF
TTERYFCPNTRCSITWFLSWSPCGECSRAITEFLSRYPHVTLFIYIARLYHHADPRNRQGLRDLISSGVTI
QIMTEQESGYCWRNFVNYSPSNEAHWPRYPHLWVRLYVLELYCIILGLPPCLNILRRKQPQLTFFTIALQ
SCHYQRLPPHILWATGLKSGSETPGTSESATPESDKKYSIGLAIGTNSVGWAVITDEYKVPSKKFKVLG
NTDRHSIKKNLIGALLFDSGETALATRLKRTARRRYTRRKNRICYLQEIFSNEMAKVDDSFFHRLEESFL
VEEDKKHERHPIFGNIVDEVAYHEKYPTIYHLRKKLVDSTDKADLRLIYLALAHMIKFRGHFLIEGDLN
PDNSDVDKLFIQLVQTYNQLFEENPINASGVDAKAILSARLSKSRRLENLIAQLPGEKKNGLFGNLIALS
LGLTPNFKSNFDLAEDAKLQLSKDTYDDDLDNLLAQIGDQYADLFLAAKNLSDAILLSDILRVNTEITK
APLSASMIKRYDEHHQDLTLLKALVRQQLPEKYKEIFFDQSKNGYAGYIDGGASQLEFYKFIKPILEKM
DGTEELLVKLNREDLLRKQRTFDNGSIPHQIHLGELHAILRRQEDFYPFLKDNREKIEKILTFRIPYYVGP
LARGNSRFAWMTRKSEETITPWNFEEVVDKGASAQSFIERMTNFDKNLPNEKVLPKHSLLYEYFTVYN
ELTKVKYVTEGMRKPAFLSGEQKKAIVDLLFKTNRKVTVKQLKEDYFKKIECFDSVEISGVEDRFNASL
GTYHDLLKIIKDKDFLDNEENEDILEDIVLTITLFEDREMIEERLKTYAHLFDDKVMKQLKRRRYTGWG
RLSRKLINGIRDKQSGKTILDFLKSDGFANRNFMQLIHDDSLTFKEDIQKAQVSGQGDSLHEHIANLAGS
PAIKKGILQTVKVVDELVKVMGRHKPENIVIEMARENQTTQKGQKNSRERMKRIEEGIKELGSQILKEH
PVENTQLQNEKLYLYYLQNGRDMYVDQELDINRLSDYDVDHIVPQSFLKDDSIDNKVLTRSDKNRGKS
DNVPSEEVVKKMKNYWRQLLNAKLITQRKFDNLTKAERGGLSELDKAGFIKRQLVETRQITKHVAQIL
DSRMNTKYDENDKLIREVKVITLKSKLVSDFRKDFQFYKVREINNYHHAHDAYLNAVVGTALIKKYPK
LESEFVYGDYKVYDVRKMIAKSEQEIGKATAKYFFYSNIMNFFKTEITLANGEIRKRPLIETNGETGEIV
WDKGRDFATVRKVLSMPQVNIVKKTEVQTGGFSKESILPKRNSDKLIARKKDWDPKKYGGFDSPTVA
YSVLVVAKVEKGKSKKLKSVKELLGITIMERSSFEKNPIDFLEAKGYKEVKKDLIIKLPKYSLFELENGR
KRMLASAGELQKGNELALPSKYVNFLYLASHYEKLKGSPEDNEQKQLFVEQHKHYLDEIIEQISEFSKR
VILADANLDKVLSAYNKHRDKPIREQAENIIHLFTLTNLGAPAAFKYFDTTIDRKRYTSTKEVLDATLIH
QSITGLYETRIDLSQLGGDSGGSTNLSDIIEKETGKQLVIQESILMLPEEVEEVIGNKPESDILVHTAYDES
TDENVMLLTSDAPEYKPWALVIQDSNGENKIKMLSGGSPKKKRKV
pmCDA1-XTEN-dCas9-UGI (bacteria)
(SEQ ID NO: 298)
MTDAEYVRIHEKLDIYTFKKQFFNNKKSVSHRCYVLFELKRRGERRACFWGYAVNKPQSGTERGIHAE
IFSIRKVELYLRDNPGQFTINWYSSWSPCADCALKILEWYNQELRGNGHTLKIWACKLYYEKNARNQI
GLWNLRDNGVGLNVMVSEHYQCCRKIFIQSSHNQLNENRWLEKTLKRAEKRRSELSIMIQVKILHTTK
SPAVSGSETPGTSESATPESDKKYSIGLAIGTNSVGWAVITDEYKVPSKKFKVLGNTDRHSIKKNLIGAL
LFDSGETAEATRLKRTARRRYTRRKNRICYLQEIFSNEMAKVDDSFFHRLEESFLVEEDKKHERHPIFGN
IVDEVAYHEKYPTIYHLRKKLVDSTDKADLRLIYLALAHMIKFRGHFLIEGDLNPDNSDVDKLFIQLVQ
TYNQLFEENPINASGVDAKAILSARLSKSRRLENLIAQLPGEKKNGLFGNLIALSLGLTPNFKSNFDLAE
DAKLQLSKDTYDDDLDNLLAQIGDQYADLFLAAKNLSDAILLSDILRVNTEITKAPLSASMIKRYDEHH
QDLTLLKALVRQQLPEKYKEIFFDQSKNGYAGYIDGGASQLEFYKFIKPILEKMDGTEELLVKLNREDL
LRKQRTFDNGSIPHQIHLGELHAILRRQEDFYPFLKDNREKIEKILTFRIPYYVGPLARGNSRFAWMTRK
SEETITPWNFEEVVDKGASAQSFIERMTNFDKNLPNEKVLPKHSLLYEYFTVYNELTKVKYVTEGMRK
PAFLSGEQKKAIVDLLFKTNRKVTVKQLKEDYFKKIECFDSVEISGVEDRFNASLGTYHDLLKIIKDKDF
LDNEENEDILEDIVLTLTLFEDREMIEERLKTYAHLFDDKVMKQLKRRRYTGWGRLSRKLINGIRDKQS
GKTILDFLKSDGFANRNFMQLIHDDSLTFKEDIQKAQVSGQGDSLHEHIANLAGSPAIKKGILQTVKVV
DELVKVMGRHKPENIVIEMARENQTTQKGQKNSRERMKRIEEGIKELGSQILKEHPVENTQLQNEKLY
LYYLQNGRDMYVDQELDINRLSDYDVDAIVPQSFLKDDSIDNKVLTRSDKNRGKSDNVPSEEVVKKM
KNYWRQLLNAKLITQRKFDNLTKAERGGLSELDKAGFIKRQLVETRQITKHVAQILDSRMNTKYDEND
KLIREVKVITLKSKLVSDFRKDFQFYKVREINNYHHAHDAYLNAVVGTALIKKYPKLESEFVYGDYKV
YDVRKMIAKSEQEIGKATAKYFFYSNIMNFFKTEITLANGEIRKRPLIETNGETGEIVWDKGRDFATVRK
VLSMPQVNIVKKTEVQTGGFSKESILPKRNSDKLIARKKDWDPKKYGGFDSPTVAYSVLVVAKVEKGK
SKKLKSVKELLGITIMERSSFEKNPIDFLEAKGYKEVKKDLIIKLPKYSLFELENGRKRMLASAGELQKG
NELALPSKYVNFLYLASHYEKLKGSPEDNEQKQLFVEQHKHYLDEIIEQISEFSKRVILADANLDKVLSA
YNKHRDKPIREQAENIIHLFTLTNLGAPAAFKYFDTTIDRKRYTSTKEVLDATLIHQSITGLYETRIDLSQ
LGGDSGGSMTNLSDIIEKETGKQLVIQESILMLPEEVELVIGNKPESDILVHTAYDESTDENVMLLTSDA
PEYKPWALVIQDSNGENKIKML
pmCDA1-XTEN-nCas9-UGI-NLS (mammalian construct)
(SEQ ID NO: 299)
MTDAEYVRIHEKLDIYTFKKQFFNNKKSVSHRCYVLFELKRRGERRACFWGYAVNKPQSGTERGIHAE
IFSIRKVELYLRDNPGQFTINWYSSWSPCADCALKILEWYNQELRGNGHTLKIWACKLYYEKNARNQI
GLWNLRDNGVGLNVMVSEHYQCCRKIFIQSSHNQLNENRWLEKTLKRAEKRRSELSIMIQVKILHTTK
SPAVSGSETPGTSESATPESDKKYSIGLAIGTNSVGWAVITDEYKVPSKKFKVLGNTDRHSIKKNLIGAL
LFDSGETAEATRLKRTARRRYTRRKNRICYLQEIFSNEMAKVDDSFFHRLEESFLVEEDKKHERHPIFGN
IVDEVAYHEKYPTIYHLRKKLVDSTDKADLRLIYLALAHMIKFRGHFLIEGDLNPDNSDVDKLFIQLVQ
TYNQLFEENPINASGVDAKAILSARLSKSRRLENLIAQLPGEKKNGLFGNLIALSLGLTPNFKSNFDLAE
DAKLQLSKDTYDDDLDNLLAQIGDQYADLFLAAKNLSDAILLSDILRVNTEITKAPLSASMIKRYDEHH
QDLTLLKALVRQQLPEKYKEIFFDQSKNGYAGYIDGGASQLEFYKFIKPILEKMDGTEELLVKLNREDL
LRKQRTFDNGSIPHQIHLGELHAILRRQEDFYPFLKDNREKIEKILTFRIPYYVGPLARGNSRFAWMTRK
SEETITPWNFEEVVDKGASAQSFIERMTNFDKNLPNEKVLPKHSLLYEYFTVYNELTKVKYVTEGMRK
PAFLSGEQKKAIVDLLFKTNRKVTVKQLKEDYFKKIECFDSVEISGVEDRFNASLGTYHDLLKIIKDKDF
LDNEENEDILEDIVLTLTLFEDREMIEERLKTYAHLFDDKVMKQLKRRRYTGWGRLSRKLINGIRDKQS
GKTILDFLKSDGFANRNFMQLIHDDSLTFKEDIQKAQVSGQGDSLHEHIANLAGSPAIKKGILQTVKVV
DELVKVMGRHKPENIVIEMARENQTTQKGQKNSRERMKRIEEGIKELGSQILKEHPVENTQLQNEKLY
LYYLQNGRDMYVDQELDINRLSDYDVDHIVPQSFLKDDSIDNKVLTRSDKNRGKSDNVPSEEVVKKM
KNYWRQLLNAKLITQRKFDNLTKAERGGLSELDKAGFIKRQLVETRQITKHVAQILDSRMNTKYDEND
KLIREVKVITLKSKLVSDFRKDFQFYKVREINNYHHAHDAYLNAVVGTALIKKYPKLESEFVYGDYKV
YDVRKMIAKSEQEIGKATAKYFFYSNIMNFFKTEITLANGEIRKRPLIETNGETGEIVWDKGRDFATVRK
VLSMPQVNIVKKTEVQTGGFSKESILPKRNSDKLIARKKDWDPKKYGGFDSPTVAYSVLVVAKVEKGK
SKKLKSVKELLGITIMERSSFEKNPIDFLEAKGYKEVKKDLIIKLPKYSLFELENGRKRMLASAGELQKG
NELALPSKYVNFLYLASHYEKLKGSPEDNEQKQLFVEQHKHYLDEIIEQISEFSKRVILADANLDKVLSA
YNKHRDKPIREQAENIIHLFTLTNLGAPAAFKYFDTTIDRKRYTSTKEVLDATLIHQSITGLYETRIDLSQ
LGGDSGGSTNLSDIIEKETGKQLVIQESILMLPEEVEEVIGNKPESDILVHTAYDESTDENVMLLTSDAPE
YKPWALVIQDSNGENKIKMLSGGSPKKKRKV
huAPOBEC3G-XTEN-dCas9-UGI (bacteria)
(SEQ ID NO: 300)
MDPPTFTFNFNNEPWVRGRHETYLCYEVERMHNDTWVLLNQRRGFLCNQAPHKHGFLEGRHAELCFL
DVIPFWKLDLDQDYRVTCFTSWSPCFSCAQEMAKFISKNKHVSLCIFTARIYDDQGRCQEGLRTLAEAG
AKISIMTYSEFKHCWDTFVDHQGCPFQPWDGLDEHSQDLSGRLRAILQSGSETPGTSESATPESDKKYSI
GLAIGTNSVGWAVITDEYKVPSKKFKVLGNTDRHSIKKNLIGALLFDSGETALATRLKRTARRRYTRRK
NRICYLQEIFSNEMAKVDDSFFHRLEESFLVEEDKKHERHPIFGNIVDEVAYHEKYPTIYHLRKKLVDST
DKADLRLIYLALAHMIKFRGHFLIEGDLNPDNSDVDKLFIQLVQTYNQLFEENPINASGVDAKAILSARL
SKSRRLENLIAQLPGEKKNGLFGNLIALSLGLTPNFKSNFDLAEDAKLQLSKDTYDDDLDNLLAQIGDQ
YADLFLAAKNLSDAILLSDILRVNTEITKAPLSASMIKRYDEHHQDLTLLKALVRQQLPEKYKEIFFDQS
KNGYAGYIDGGASQLEFYKFIKPILEKMDGTEELLVKLNREDLLRKQRTFDNGSIPHQIHLGELHAILRR
QEDFYPFLKDNREKIEKILTFRIPYYVGPLARGNSRFAWMTRKSEETITPWNFEEVVDKGASAQSFIERM
TNFDKNLPNEKVLPKHSLLYEYFTVYNELTKVKYVTEGMRKPAFLSGEQKKAIVDLLFKTNRKVTVK
QLKEDYFKKIECFDSVEISGVEDRFNASLGTYHDLLKIIKDKDFLDNEENEDILEDIVLTLTLFEDREMIE
ERLKTYAHLFDDKVMKQLKRRRYTGWGRLSRKLINGIRDKQSGKTILDFLKSDGFANRNFMQLIHDDS
LTFKEDIQKAQVSGQGDSLHEHIANLAGSPAIKKGILQTVKVVDELVKVMGRHKPENIVIEMARENQTT
QKGQKNSRERMKRIEEGIKELGSQILKEHPVENTQLQNEKLYLYYLQNGRDMYVDQELDINRLSDYDV
DAIVPQSFLKDDSIDNKVLTRSDKNRGKSDNVPSEEVVKKMKNYWRQLLNAKLITQRKFDNLTKAER
GGLSELDKAGFIKRQLVETRQITKHVAQILDSRMNTKYDENDKLIREVKVITLKSKLVSDFRKDFQFYK
VREINNYHHAHDAYLNAVVGTALIKKYPKLESEFVYGDYKVYDVRKMIAKSEQEIGKATAKYFFYSNI
MNFFKTEITLANGEIRKRPLIETNGETGEIVWDKGRDFATVRKVLSMPQVNIVKKTEVQTGGFSKESILP
KRNSDKLIARKKDWDPKKYGGFDSPTVAYSVLVVAKVEKGKSKKLKSVKELLGITIMERSSFEKNPIDF
LEAKGYKEVKKDLIIKLPKYSLFELENGRKRMLASAGELQKGNELALPSKYVNFLYLASHYEKLKGSP
EDNEQKQLFVEQHKHYLDEIIEQISEFSKRVILADANLDKVLSAYNKHRDKPIREQAENIIHLFTLTNLG
APAAFKYFDTTIDRKRYTSTKEVLDATLIHQSITGLYETRIDLSQLGGDSGGSMTNLSDIIEKETGKQLVI
QESILMLPEEVEEVIGNKPESDILVHTAYDESTDENVMLLTSDAPEYKPWALVIQDSNGENKIKML
huAPOBEC3G-XTEN-nCas9-UGI-NLS (mammalian construct)
(SEQ ID NO: 301)
MDPPTFTFNFNNEPWVRGRHETYLCYEVERMHNDTWVLLNQRRGFLCNQAPHKHGFLEGRHAELCFL
DVIPFWKLDLDQDYRVTCFTSWSPCFSCAQEMAKFISKNKHVSLCIFTARIYDDQGRCQEGLRTLAEAG
AKISIMTYSEFKHCWDTFVDHQGCPFQPWDGLDEHSQDLSGRLRAILQSGSETPGTSESATPESDKKYSI
GLAIGTNSVGWAVITDEYKVPSKKFKVLGNTDRHSIKKNLIGALLFDSGETALATRLKRTARRRYTRRK
NRICYLQEIFSNEMAKVDDSFFHRLEESFLVEEDKKHERHPIFGNIVDEVAYHEKYPTIYHLRKKLVDST
DKADLRLIYLALAHMIKFRGHFLIEGDLNPDNSDVDKLFIQLVQTYNQLFEENPINASGVDAKAILSARL
SKSRRLENLIAQLPGEKKNGLFGNLIALSLGLTPNFKSNFDLAEDAKLQLSKDTYDDDLDNLLAQIGDQ
YADLFLAAKNLSDAILLSDILRVNTEITKAPLSASMIKRYDEHHQDLTLLKALVRQQLPEKYKEIFFDQS
KNGYAGYIDGGASQLEFYKFIKPILEKMDGTEELLVKLNREDLLRKQRTFDNGSIPHQIHLGELHAILRR
QEDFYPFLKDNREKIEKILTFRIPYYVGPLARGNSRFAWMTRKSEETITPWNFEEVVDKGASAQSFIERM
TNFDKNLPNEKVLPKHSLLYEYFTVYNELTKVKYVTEGMRKPAFLSGEQKKAIVDLLFKTNRKVTVK
QLKEDYFKKIECFDSVEISGVEDRFNASLGTYHDLLKIIKDKDFLDNEENEDILEDIVLTLTLFEDREMIE
ERLKTYAHLFDDKVMKQLKRRRYTGWGRLSRKLINGIRDKQSGKTILDFLKSDGFANRNFMQLIHDDS
LTFKEDIQKAQVSGQGDSLHEHIANLAGSPAIKKGILQTVKVVDELVKVMGRHKPENIVIEMARENQTT
QKGQKNSRERMKRIEEGIKELGSQILKEHPVENTQLQNEKLYLYYLQNGRDMYVDQELDINRLSDYDV
DHIVPQSFLKDDSIDNKVLTRSDKNRGKSDNVPSEEVVKKMKNYWRQLLNAKLITQRKFDNLTKAER
GGLSELDKAGFIKRQLVETRQITKHVAQILDSRMNTKYDENDKLIREVKVITLKSKLVSDFRKDFQFYK
VREINNYHHAHDAYLNAVVGTALIKKYPKLESEFVYGDYKVYDVRKMIAKSEQEIGKATAKYFFYSNI
MNFFKTEITLANGEIRKRPLIETNGETGEIVWDKGRDFATVRKVLSMPQVNIVKKTEVQTGGFSKESILP
KRNSDKLIARKKDWDPKKYGGFDSPTVAYSVLVVAKVEKGKSKKLKSVKELLGITIMERSSFEKNPIDF
LEAKGYKEVKKDLIIKLPKYSLFELENGRKRMLASAGELQKGNELALPSKYVNFLYLASHYEKLKGSP
EDNEQKQLFVEQHKHYLDEIIEQISEFSKRVILADANLDKVLSAYNKHRDKPIREQAENIIHLFTLTNLG
APAAFKYFDTTIDRKRYTSTKEVLDATLIHQSITGLYETRIDLSQLGGDSGGSTNLSDIIEKETGKQLVIQ
ESILMLPEEVEEVIGNKPESDILVHTAYDESTDENVMLLTSDAPEYKPWALVIQDSNGENKIKMLSGGSP
KKKRKV
huAPOBEC3G (D316R_D317R)-XTEN-nCas9-UGI-NLS (mammalian construct)
(SEQ ID NO: 302)
MDPPTFTFNFNNEPWVRGRHETYLCYEVERMHNDTWVLLNQRRGFLCNQAPHKHGFLEGRHAELCFL
DVIPFWKLDLDQDYRVTCFTSWSPCFSCAQEMAKFISKNKHVSLCIFTARIYRRQGRCQEGLRTLAEAG
AKISIMTYSEFKHCWDTFVDHQGCPFQPWDGLDEHSQDLSGRLRAILQSGSETPGTSESATPESDKKYSI
GLAIGTNSVGWAVITDEYKVPSKKFKVLGNTDRHSIKKNLIGALLFDSGETALATRLKRTARRRYTRRK
NRICYLQEIFSNEMAKVDDSFFHRLEESFLVEEDKKHERHPIFGNIVDEVAYHEKYPTIYHLRKKLVDST
DKADLRLIYLALAHMIKFRGHFLIEGDLNPDNSDVDKLFIQLVQTYNQLFEENPINASGVDAKAILSARL
SKSRRLENLIAQLPGEKKNGLFGNLIALSLGLTPNFKSNFDLAEDAKLQLSKDTYDDDLDNLLAQIGDQ
YADLFLAAKNLSDAILLSDILRVNTEITKAPLSASMIKRYDEHHQDLTLLKALVRQQLPEKYKEIFFDQS
KNGYAGYIDGGASQLEFYKFIKPILEKMDGTEELLVKLNREDLLRKQRTFDNGSIPHQIHLGELHAILRR
QEDFYPFLKDNREKIEKILTFRIPYYVGPLARGNSRFAWMTRKSEETITPWNFEEVVDKGASAQSFIERM
TNFDKNLPNEKVLPKHSLLYEYFTVYNELTKVKYVTEGMRKPAFLSGEQKKAIVDLLFKTNRKVTVK
QLKEDYFKKIECFDSVEISGVEDRFNASLGTYHDLLKIIKDKDFLDNEENEDILEDIVLTLTLFEDREMIE
ERLKTYAHLFDDKVMKQLKRRRYTGWGRLSRKLINGIRDKQSGKTILDFLKSDGFANRNFMQLIHDDS
LTFKEDIQKAQVSGQGDSLHEHIANLAGSPAIKKGILQTVKVVDELVKVMGRHKPENIVIEMARENQTT
QKGQKNSRERMKRIEEGIKELGSQILKEHPVENTQLQNEKLYLYYLQNGRDMYVDQELDINRLSDYDV
DHIVPQSFLKDDSIDNKVLTRSDKNRGKSDNVPSEEVVKKMKNYWRQLLNAKLITQRKFDNLTKAER
GGLSELDKAGFIKRQLVETRQITKHVAQILDSRMNTKYDENDKLIREVKVITLKSKLVSDFRKDFQFYK
VREINNYHHAHDAYLNAVVGTALIKKYPKLESEFVYGDYKVYDVRKMIAKSEQEIGKATAKYFFYSNI
MNFFKTEITLANGEIRKRPLIETNGETGEIVWDKGRDFATVRKVLSMPQVNIVKKTEVQTGGFSKESILP
KRNSDKLIARKKDWDPKKYGGFDSPTVAYSVLVVAKVEKGKSKKLKSVKELLGITIMERSSFEKNPIDF
LEAKGYKEVKKDLIIKLPKYSLFELENGRKRMLASAGELQKGNELALPSKYVNFLYLASHYEKLKGSP
EDNEQKQLFVEQHKHYLDEIIEQISEFSKRVILADANLDKVLSAYNKHRDKPIREQAENIIHLFTLTNLG
APAAFKYFDTTIDRKRYTSTKEVLDATLIHQSITGLYETRIDLSQLGGDSGGSTNLSDIIEKETGKQLVIQ
ESILMLPEEVEEVIGNKPESDILVHTAYDESTDENVMLLTSDAPEYKPWALVIQDSNGENKIKMLSGGSP
KKKRKV
Base Editor 4 (BE4; APOBEC1-linker(32 aa)-Cas9n(D10A)-linker(9 aa)-UGI-
linker(9 aa)-UGI)
(SEQ ID NO: 2495)
MSSETGPVAVDPTLRRRIEPHEFEVFFDPRELRKETCLLYEINWGGRHSIWRHTSQNTNKHVEVNFIEKF
TTERYFCPNTRCSITWFLSWSPCGECSRAITEFLSRYPHVTLFIYIARLYHHADPRNRQGLRDLISSGVTI
QIMTEQESGYCWRNFVNYSPSNEAHWPRYPHLWVRLYVLELYCIILGLPPCLNILRRKQPQLTFFTIALQ
SCHYQRLPPHILWATGLKSGGSSGGSSGSETPGTSESATPESSGGSSGGSDKKYSIGLAIGTNSVGWAVI
TDEYKVPSKKFKVLGNTDRHSIKKNLIGALLFDSGETALATRLKRTARRRYTRRKNRICYLQEIFSNEM
AKVDDSFFHRLEESFLVEEDKKHERHPIFGNIVDEVAYHEKYPTIYHLRKKLVDSTDKADLRLIYLALA
HMIKFRGHFLIEGDLNPDNSDVDKLFIQLVQTYNQLFEENPINASGVDAKAILSARLSKSRRLENLIAQL
PGEKKNGLFGNLIALSLGLTPNFKSNFDLAEDAKLQLSKDTYDDDLDNLLAQIGDQYADLFLAAKNLS
DAILLSDILRVNTEITKAPLSASMIKRYDEHHQDLTLLKALVRQQLPEKYKEIFFDQSKNGYAGYIDGGA
SQLEFYKFIKPILEKMDGTEELLVKLNREDLLRKQRTFDNGSIPHQIHLGELHAILRRQEDFYPFLKDNR
EKIEKILTFRIPYYVGPLARGNSRFAWMTRKSEETITPWNFEEVVDKGASAQSFIERMTNFDKNLPNEK
VLPKHSLLYEYFTVYNELTKVKYVTEGMRKPAFLSGEQKKAIVDLLFKTNRKVTVKQLKEDYFKKIEC
FDSVEISGVEDRFNASLGTYHDLLKIIKDKDFLDNEENEDILEDIVLTLTLFEDREMIEERLKTYAHLFDD
KVMKQLKRRRYTGWGRLSRKLINGIRDKQSGKTILDFLKSDGFANRNFMQLIHDDSLTFKEDIQKAQV
SGQGDSLHEHIANLAGSPAIKKGILQTVKVVDELVKVMGRHKPENIVIEMARENQTTQKGQKNSRERM
KRIEEGIKELGSQILKEHPVENTQLQNEKLYLYYLQNGRDMYVDQELDINRLSDYDVDHIVPQSFLKDD
SIDNKVLTRSDKNRGKSDNVPSEEVVKKMKNYWRQLLNAKLITQRKFDNLTKAERGGLSELDKAGFI
KRQLVETRQITKHVAQILDSRMNTKYDENDKLIREVKVITLKSKLVSDFRKDFQFYKVREINNYHHAH
DAYLNAVVGTALIKKYPKLESEFVYGDYKVYDVRKMIAKSEQEIGKATAKYFFYSNIMNFFKTEITLA
NGEIRKRPLIETNGETGEIVWDKGRDFATVRKVLSMPQVNIVKKTEVQTGGFSKESILPKRNSDKLIARK
KDWDPKKYGGFDSPTVAYSVLVVAKVEKGKSKKLKSVKELLGITIMERSSFEKNPIDFLEAKGYKEVK
KDLIIKLPKYSLFELENGRKRMLASAGELQKGNELALPSKYVNFLYLASHYEKLKGSPEDNEQKQLFVE
QHKHYLDEIIEQISEFSKRVILADANLDKVLSAYNKHRDKPIREQAENIIHLFTLTNLGAPAAFKYFDTTI
DRKRYTSTKEVLDATLIHQSITGLYETRIDLSQLGGDSGGSGGSGGSTNLSDIIEKETGKQLVIQESILML
PEEVEEVIGNKPESDILVHTAYDESTDENVMLLTSDAPEYKPWALVIQDSNGENKIKMLSGGSGGSGGS
TNLSDIIEKETGKQLVIQESILMLPEEVEEVIGNKPESDILVHTAYDESTDENVMLLTSDAPEYKPWALVI
QDSNGENKIKMLSGGSPKKKRK

### Example 2: CRISPR/Cas9 Genome/Base-Editing Methods for Modifying Ion Channels in Dorsal Root Ganglia (DRG)

[0203] Long-term chronic pain due to trauma and associated with advanced cancer remains an unmet medical need. Management of pain using painkillers is inherently limited by the development of tolerance, physiological dependence, progressive addiction, and potential for overdose. Current health policies in response to the massive demand for painkillers (˜80-100 million patients/year in the US) have led to extensive prescription of opioids, inadvertently contributing to broader public challenges associated with substance abuse and drug-related crime. Fundamentally, there is a pressing need for an innovative solution to address chronic pain that is non-addictive, generalizable, and permanent.

[0204] A normal physiological outcome of trauma, inflammation, and nerve injury is the induction of gene expression changes in neighboring nociceptive neurons during the period required for healing, for example by facilitating the firing of action potentials by neurons at a lower activation threshold. These gene expression changes underlie the sensations of hyperalgesia (increased pain sensitivity) and allodynia (pain following a normally innocuous stimulus). Chronic pain develops when the enhanced sensitization of sensory neurons becomes irreversibly established and becomes a persistent maladaptive condition. The functional specialization of sensory neurons is driven by the expression of dedicated ion channel genes that fine-tune the membrane polarization to trigger and propagate action potentials in response to stimuli (Table 12).¹ Therefore, in simple terms the etiology of chronic pain can be described as the dysregulated expression of just a few genes in just a few neurons. However, to date, genetic treatments of chronic pain have not been successfully translated into human therapeutics.^{2,3}

[0205] In general, the types of chronic pain that occur in most parts of the body and the extremities involve afferent neurons of the dorsal root ganglia (DRG), which reside in clusters of nerve cells near the spinal cord and have long axons extending towards the skin, muscles, and organs, etc. (FIG. 1).^{1,4} The mechanism of enhanced excitability involves voltage-gated ion channels and background/leak channels that set the resting membrane potential and firing threshold of DRG neurons (Table 12).¹ Under normal conditions, chemical, mechanical, or thermal stimuli are required to activate receptors and ion channels in peripheral nerve endings to initiate action potentials that propagate along the axons of DRG neurons (FIG. 1). Finally, the dendritic termini of the DRG neurons liberate glutamate and substance-P at synapses in the spinal cord dorsal horn, activating second-order neurons that communicate pain signals to the brain.¹

[0206] Described herein is a novel approach to address chronic pain by deploying various genome-editing agents to modify the genes responsible for propagation of pain signals in dysregulated DRG neurons, by selectively targeting the local nerve endings at the sites of pain using neuron-specific viral vectors (FIG. 2). The genome editing reactions described herein can be achieved by any of the major types of genome editing tools: (i) base-editors that catalyze chemical reactions on nucleobases (e.g., cytidine deaminase-Cas9 fusion⁵); (ii) programmable nucleases with DNA cutting activity (e.g., WT Cas9,⁶⁻⁸ paired Cas9 nickases9 or Fok1-nuclease-dCas⁹ fusions,^{10,11} or compatible analogs such as Cpf1,¹² NgAgo,¹³ etc.); as well as (iii) TALENs, zinc-finger nucleases, etc.^{14,15} The best studied example of a neurotropic virus that has potential as a delivery vector for genome editing constructs is Herpes Simplex Virus 1 (HSV-1),¹⁶ which targets nerve endings in vivo and usurps retrograde axon transport to move the viral DNA up to the cell body of DRG neurons.¹⁷ Therefore, using a neurotropic virus as a delivery strategy enables genome editing treatments aimed at the sites of pain, despite the fact that the genetic material within the nuclei of DRG neurons is quite distant and indistinguishable from unrelated cells within each ganglion (FIG. 2).⁴ HSV-1 vectors have the additional advantage of packaging a large double-stranded DNA genome (>150 kbp),¹⁸ which can easily accommodate an expression construct for any programmable genome-editing enzyme (4-5 kbp),¹⁹ multiple guide-RNAs, and regulatory sequences. Constructs up to 30 to 40 kbp can be inserted by replacing non-essential genes of HSV-1,16 and alternatively a designed 100 kbp amplicon can be packaged into helper HSV-1 capsids.²⁰ Examples of other potentially useful neurotropic viruses include the broader herpesviridae group,²¹ varicella-zoster, pseudorabies, cytomegalovirus, Epstein-Barr viruses, encephalitis viruses, polio, coxsackie, echo, mumps, measles, and rabies viruses.^{22,23}

[0207] This genome editing treatment incorporates multiple design elements that achieve precise and selective targeting of genome editing agents to pain-causative neurons, arising from: 1) localized delivery of a non-replicative viral vector that requires synaptic terminals, sparing the bulk of somatic tissues near the pain site, 2) neuron-specific promoters that drive expression of the genome editing construct, and 3) guide-RNA programmed targeting of non-essential ion channel genes exclusively expressed by DRG neurons to spare other types of neurons (efferent neurons, interneurons, etc.). Safety can be further enhanced using high-specificity Cas9 nuclease variants,^{9,10,24,25} and guide-RNAs without off-target matches in the human genome,^{26,27} as well as limiting the stability, activity, or expression of the construct, etc.^{28,29} By contrast, traditional pharmacological modulation of localized DRG neuron signaling would be challenging to achieve using small molecules or antibodies,^{30,31} because these spread systemically and must be optimized for selectivity among many similar ion channel isoforms.³² Therefore, such strategies are still in early development.³³ Pharmacological analgesics and opioids act rapidly but reversibly, while genome editing is essentially permanent, therefore, standard medications may be co-administered over the period required for the delivery vector and the expression construct to take action.

[0208] Human DRG neurons constitutively express specific and specialized ion channels that have been implicated in afferent pain signaling,1 and fulfill the required criteria as targets for modulation of chronic pain conditions. Three sodium channels (NaV1.7, NaV1.8, and NaV1.9) are constitutively expressed in DRG neurons, and a fourth gene (NaV1.3) displays elevated expression after nerve injury (Table 12).¹ Genetic evidence from spontaneous mutations of NaV1.7 (SCN9A) in humans,³⁴⁻³⁷ and animal models,³⁸ strongly suggests that the phenotypic outcome of gene ablation, loss-of-function, destabilization of the transcript and/or protein folding will be the eradication of pain transmission,³⁴⁻³⁶ without compromising the normal function of the DRG neurons in triggering action potentials reaching a normal membrane depolarization threshold (FIG. 1). Disruption of SCN9A is only desirable at a localized level, because nociception is essentially a protective mechanism from overextension and deformation for our joints and muscles,³⁴⁻³⁶ and it is also necessary for our sense of smell.³⁹ In the extreme, humans presenting homozygous SCN9A loss-of-function mutations present Congenital Insensitivity to Pain (CIP).³⁴⁻³⁶ Conversely, gain-of-function mutations in the sodium channels NaV1.7 (SCN9A) or NaV1.8 (SCN10A) cause congenital pain syndromes such as Primary Erythermalgia.³⁷ Moreover, the SCN9A gene is also involved in itching.^{30,40}

[0209] Guide sequences for programming the disruption of SCN9A gene using cytidine deaminase base-editors are shown in Tables 2, 4, and 6. Top scoring guide sequences are listed in Tables 7-9. Top-scoring guide-RNAs for Cas9 nuclease and paired nickases are shown in Table 10 and 11. Interestingly, gain-of-function mutations in the sodium channel NaV1.9 (SCN11A) are known to reduce pain transmission,^{38,41} which can be potentially replicated using cytosine deamination base-editors. These strategies can be extended to other ion channels expressed in DRG neurons (FIG. 3). Alternative target genes include the voltage-gated calcium channel CaV3.2 (CACNA1H),⁴² the calcium-activated chloride channel (ANO1),^{43,44} and the hyperpolarization-activated cation channels (HCN1 and HCN2) (Table 12).^{45,46} Moreover, these concepts can be further extended by implementing functional genomic screening of guide-RNA libraries in cell lines,^{47,48} towards the unbiased identification of new target genes and genomic locations that indirectly modulate the DRG neuron ion channels and other mechanisms.¹

[0210] In conclusion, chronic pain could be permanently suppressed with unprecedented anatomical precision by genome editing treatment of a small number of DRG neurons, which are the root cause of the condition. This new treatment exploits numerous design elements for specificity and safety, and in principle, can be curative. By engaging the distal axon projections of DRG neurons in the region of chronic pain, this approach is both specific and potentially generalizable to theoretically any location in the body to treat dysregulated neuronal firing established by countless sources of trauma, and regardless of the time that may have elapsed since the onset of chronic pain.

TABLE 12
Ion Channel Genes in DRG Neurons Responsible for Pain Propagation

| Channel | Gene | Channel type and | | Target validation |
|---|---|---|---|---|
| name | name | function | Expression evidence | evidence |
| Na_{V}1.7 | SCN9A | Tetrodotoxin (TTX)- | Peripheral neuron specific. | Loss-of-function and |
| | | sensitive rapidly | Constitutive, and elevated | gain-of-function |
| | | inactivating sodium | after nerve injury | mutations |
| | | current | and inflammation | |
| Na_{V}1.8 | SCN10A | TTX-resistant slowly | DRG specific. | Loss-of-function |
| | | inactivating sodium | Constitutive, and elevated | mutations |
| | | current | after nerve injury | |
| | | | and inflammation | |
| Na_{V}1.9 | SCN11A | TTX-resistant | DRG specific. | Gain-of-function |
| | | persistent sodium | Constitutive, and elevated | mutations |
| | | current | after nerve injury | |
| | | | and inflammation | |
| Na_{V}1.3 | SCN3A | TTX-sensitive rapidly | Elevated expression after | |
| | | inactivating sodium | axotomy and nerve injury | |
| | | current | | |
| Ca_{V}3.2 | CACNA1H | T-type calcium current | Constitutive, and elevated | KO mice and genetic |
| | | | after nerve injury | models |
| | | | and inflammation | |
| HCN1 | HCN1 | Hyperpolarization- | Constitutive, and elevated | |
| | | activated cation | after inflammation | |
| | | current | and chemotherapy | |
| HCN2 | HCN2 | Hyperpolarization- | Constitutive, and elevated | |
| | | activated cation | after inflammation | |
| | | current | | |
| Ano1 | ANO1 | Calcium-activated | Constitutive, and elevated | |
| | | chloride current | after nerve injury. | |

[0211] Human SCAM primary protein and cDNA sequence alignment. Underlined: examples of residues and codons predicted to produce a premature stop codon, inactivation, loss-of-function, or destabilization of protein folding, as a result of base-editing using a cytidine deaminase-Cas9 construct.

```
gaggagctgaagaggaattaaaatatacaggatgaaaagatggcaatgttgcctccccca
                                                                                M A M L P P P
ggacctcagagctttgtccatttcacaaaacagtctcttgccctcattgaacaacgcatt
  G P Q S F V H F T K Q S L A L I E Q R I
gctgaaagaaaatcaaaggaacccaaagaagaaaagaaagatgatgatgaagaagcccca
  A E R K S K E P K E E K K D D D E E A P
aagccaagcagtgacttggaagctggcaaacagctgcccttcatctatggggacattcct
  K P S S D L E A G K Q L P F I Y G D I P
cccggcatggtgtcagagcccctggaggacttggacccctactatgcagacaaaaagact
  P G M V S E P L E D L D P Y Y A D K K T
ttcatagtattgaacaaagggaaaacaatcttccgtttcaatgccacacctgctttatat
  F I V L N K G K T I F R F N A T P A L Y
atgctttctcctttcagtcctctaagaagaatatctattaagattttagtacactcctta
  M L S P F S P L P R I S I K I L V H S L
ttcagcatgctcatcatgtgcactattctgacaaactgcatatttatgaccatgaataac
  F S M L I M C T I L T N C I F M T M N N
ccaccggactggaccaaaaatgtcgagtacacttttactggaatatatacttttgaatca
  P P D W T K N V E Y T F T G I Y T F E S
cttgtaaaaatccttgcaagaggcttctgtgtaggagaattcacttttcttcgtgacccg
  L V K I L A R G F C V G E F T F L R D P
tggaactggctggattttgtcgtcattgtttttgcgtatttaacagaattcgtaaaccta
  W N W L D F V V I V F A Y L T E F V N L
ggcaatgtttcagctcttcgaactttcagagtattgagagctttgaaaactatttctgca
  G N V S A L R T F R V L R A L K T I S V
atcccaggcctgaagacaattgtaggggctttgatccagtcagtgaagaagctttctgat
  I P G L K T I V G A L I Q S V K K L S D
gtcatgatcctgactgtgttctgtctgagtgtgtttgcactaattggactacagctgttc
  V M I L T V F C L S V F A L I G L Q L F
atgggaaacctgaagcataaatgttttcgaaattcacttgaaaataatgaaacattagaa
  M G N L K H K C F R N S L E N N E T L E
agcataatgaataccctagagagtgaagaagactttagaaaatatttttattacttggaa
  S I M N T L E S E E D F R K Y F Y Y L E
ggatccaaagatgctctcctttgtggtttcagcacagattcaggtcagtgtccagagggg
  G S K D A L L C G F S T D S G Q C P E G
tacacctgtgtgaaaattggcagaaaccctgattatggctacacgagctttgacactttc
  Y T C V K I G R N P D Y G Y T S F D T F
agctgggccttcttagccttgtttaggctaatgacccaagattactgggaaaacctttac
  S W A F L A L F R L M T Q D Y W E N L Y
caacagacgctgcgtgctgctggcaaaacctacatgatcttctttgtcgtagtgattttc
  Q Q T L R A A G K T Y M I F F V V V I F
ctgggctccttttatctaataaacttgatcctggctgtggttgccatggcatatgaagaa
  L G S F Y L I N L I L A V V A M A Y E E
cagaaccaggcaaacattgaagaagctaaacagaaagaattagaatttcaacagatgtta
  Q N Q A N I E E A K Q K E L E F Q Q M L
gaccgtcttaaaaaagagcaagaagaagctgaggcaattgcagcggcagcggctgaatat
  D P L K K E Q E E A E A I A A A A A E Y
acaagtattaggagaagcagaattatgggcctctcagagagttcttctgaaacatccaaa
  T S I R R S R I M G L S E S S S E T S K
ctgagctctaaaagtgctaaagaaagaagaaacagaagaaagaaaaagaatcaaaagaag
  L S S K S A K E R R N R R K K K N Q K K
ctctccagtggagaggaaaagggagatgctgagaaattgtcgaaatcagaatcagaggac
  L S S G E E K G D A E K L S K S E S E D
agcatcagaagaaaaagtttccaccttggtgtcgaagggcataggcgagcacatgaaaag
  S I R R K S F H L G V E G H R R A H E K
aggttgtgctaccccaatcagtcaccactcagcattcgtggctccttgttttctgcaagg
  R L S I P N Q S P L S I R G S L F S A R
cgaagcagcagaacaagtctttttagtttcaaaggcagaggaagagatataggatctgag
  R S S R T S L F S F K G R G R D I G S E
actgaatttgccgatgatgagcacagcatttttggagacaatgagagcagaaggggctca
  T E F A D D E H S I F G D N E S R R G S
ctgtttgtgccccacagaccccaggagcgacgcagcagtaacatcagccaagccagtagg
  L F V P H R P Q E R R S S N I S Q A S R
tccccaccaatgctgccggtgaacgggaaaatgcacagtgctgtggactgcaacggtgtg
  S P P M L P V N G K M H S A V D C N G V
gtctccctggttgatggacgctcagccctcatgctccccaatggacagcttctgccagag
  V S L V D G R S A L M L P N G Q L L P E
ggcacgaccaatcaaatacacaagaaaaggcgttgtagttcctatctcctttcagaggat
  G T T N Q I H K K R R C S S Y L L S E D
atgctgaatgatcccaacctcagacagagagcaatgagtagagcaagcatattaacaaac
  M L N D P N L R Q R A M S R A S I L T N
actgtggaagaacttgaagagtccagacaaaaatgtccaccttggtggtacagatttgca
  T V E E L E E S R Q K C P P W W Y R F A
cacaaattcttgatctggaattgctctccatattggataaaattcaaaaagtgtatctat
  H K F L I W N C S P Y W I K F K K C I Y
tttattgtaatggatccttttgtagatcttgcaattaccatttgcatagttttaaacaca
  F I V M D P F V D L A I T I C I V L N T
ttatttatggctatggaacaccacccaatgactgaggaattcaaaaatgtacttgctata
  L F A M A M E H P M T E E F K N V L A I
ggaaatttggtctttactggaatctttgcagctgaaatggtattaaaactgattgccatg
  G N L V F T G I F A A E M V L K L I A M
gatccatatgagtatttccaagtaggctggaatatttttgacagccttattgtgacttta
  D P Y E Y F Q V G W N I F D S L I V T L
agtttagtggagctctttctagcagatgtggaaggattgtcagttctgcgatcattcaga
  S L V E L F L A D V E G L S V L R S F R
ctgctccgagtcttcaagttggcaaaatcctggccaacattgaacatgctgattaagatc
  L L R V P K L A K S W P T L N M L I K I
attggtaactcagtaggggctctaggtaacctcaccttagtgttggccatcatcgtcttc
  I G N S V G A L G N L T L V L A I I V F
atttttgctgtggtcggcatgcagctctttggtaagagctacaaagaatgtgtctgcaag
  I F A V V G M Q L F G K S Y K E C V C K
atcaatgatgactgtacgctcccacggtggcacatgaacgacttcttccactccttcctg
  I N D D C T L P R W H M N D F F H S F L
attgtgttccgcgtgctgtgtggagagtggatagagaccatgtgggactgtatggaggtc
  I V F R V L C G E W I E T M W D C M E V
gctggtcaagctatgtgccttattgtttacatgatggtcatggtcattggaaacctggtg
  A G Q A M C L V I Y M M V M V I G N L V
gtcctaaacctatttctggccttattattgagctcatttagttcagacaatcttacagca
  V L N L F L A L L L S S F S S D N L T A
attgaagaagaccctgatgcaaacaacctccagattgcagtgactagaattaaaaaggga
  I E E D P D A N N L Q I A V T R I K K G
ataaattatgtgaaacaaaccttacgtgaatttattctaaaagcattttccaaaaagcca
  I N Y V K Q T L R E F I L K A F S K K P
aagatttccagggagataagacaagcagaagatctgaatactaagaaggaaaactatatt
  K I S R E I R Q A E D L N T K K E N Y I
tctaaccatacacttgctgaaatgagcaaaggtcacaatttcctcaaggaaaaagataaa
  S N H T L A E M S K G H N F L K E K D K
atcagtggttttggaagcagcgtggacaaacacttgatggaagacagtgatggtcaatca
  I S G F G S S V D K H L M E D S D G Q S
tttattcacaatcccagcctcacagtgacagtgccaattgcacctggggaatccgatttg
  F I H N P S L T V T V P I A P G E S D L
gaaaatatgaatgctgaggaacttagcagtgattcggatagtgaatacagcaaagtgaga
  E N M N A E E L S S D S D S E Y S K V R
ttaaaccggtcaagctcctcagagtgcagcacagttgataaccctttgcctggagaagga
  L N R S S S S E C S T V D N P L P G E G
gaagaagcagaggctgaacctatgaattccgatgagccagaggcctgtttcacagatggt
  E E A E A E P M N S D E P E A C F T D G
tgtgtatggaggttctcatgctgccaagttaacatagagtcagggaaaggaaaaatctgg
  C V W R P S C C Q V N I E S G K G K I W
tggaacatcaggaaaacctgctacaagattgttgaacacagttggtttgaaagcttcatt
  W N I R K T C Y K I V E H S W F E S F I
gtcctcatgatcctgctcagcagtggtgccctggcttttgaagatatttatattgaaagg
  V L M I L L S S G A L A F E D I Y I E R
aaaaagaccattaagattatcctggagtatgcagacaagatcttcacttacatcttcatt
  K K T I K I I L E Y A D K I F T Y I F I
ctggaaatgcttctaaaatggatagcatatggttataaaacatatttcaccaatgcctgg
  L E M L L K W I A Y G Y K T Y F T N A W
tgttggctggatttcctaattgttgatgtttctttggttactttagtggcaaacactctt
  C W L D F L I V D V S L V T L V A N T L
ggctactcagatcttggccccattaaatcccttcggacactgagagctttaagacctcta
  G Y S D L G P I K S L R T L R A L R P L
agagccttatctagatttgaaggaatgagggtcgttgtgaatgcactcataggagcaatt
  R A L S R F E G M R V V V N A L I G A I
ccttccatcatgaatgtgctacttgtgtgtcttatattctggctgatattcagcatcatg
  P S I M N V L L V C L I F W L I F S I M
ggagtaaatttgtttgctggcaagttctatgagtgtattaacaccacagatgggtcacgg
  G V N L F A G K F Y E C I N T T D G S R
tttcctgcaagtcaagttccaaatcgttccgaatgttttgcccttatgaatgttagtcaa
  F P A S Q V P N R S E C F A L M N V S Q
aatgtgcgatggaaaaacctgaaagtgaactttgataatgtcggacttggttacctatct
  N V R W K N L K V N F D N V G L G Y L S
ctgcttcaagttgcaacttttaagggatggacgattattatgtatgcagcagtggattct
  L L Q V A T F K G W T I I M Y A A V D S
gttaatgtagacaagcagcccaaatatgaatatagcctctacatgtatatttattttgtc
  V N V D K Q P K Y E Y S L Y M Y I Y F V
gtctttatcatctttgggtcattcttcactttgaacttgttcattggtgtcatcatagat
  V F I I F G S F F T L N L F I G V I I D
aatttcaaccaacagaaaaagaagcttggaggtcaagacatctttatgacagaagaacag
  N F N Q Q K K K L G G Q D I F M T E E Q
aagaaatactataatgcaatgaaaaagctggggtccaagaagccacaaaagccaattcct
  K K Y Y N A M K K L G S K K P Q K P I P
cgaccagggaacaaaatccaaggatgtatatttgacctagtgacaaatcaagcctttgat
  R P G N K I Q G C I F D L V T N Q A F D
attagtatcatggttcttatctgtctcaacatggtaaccatgatggtagaaaaggagggt
  I S I M V L I C L N M V T M M V E K E G
caaagtcaacatatgactgaagttttatattggataaatgtggtttttataatccttttc
  Q S Q H M T E V L Y W I N V V F I I L F
actggagaatgtgtgctaaaactgatctccctcagacactactacttcactgtaggatgg
  T G E C V L K L I S L R H Y Y F T V G W
aatatttttgattttgtggttgtgattatctccattgtaggtatgtttctagctgatttg
  N I F D F V V V I I S I V G M F L A D L
attgaaacgtattttgtgtcccctaccctgttccgagtgatccgtcttgccaggattggc
  I E T Y P V S P T L F R V I R L A R I G
cgaatcctacgtctagtcaaaggagcaaaggggatccgcacgctgctctttgctttgatg
  R I L R L V K G A K G I R T L L F A L M
atgtcccttcctgcgttgtttaacatcggcctcctgctcttcctggtcatgttcatctac
  M S L P A L F N I G L L L F L V M F I Y
gccatctttggaatgtccaactttgcctatgttaaaaaggaagatggaattaatgacatg
  A I F G M S N F A Y V K K E D G I N D M
ttcaattttgagacctttggcaacagtatgatttgcctgttccaaattacaacctctgct
  F N F E T P G N S M I C L F Q I T T S A
ggctgggatggattgctagcacctattcttaacagtaagccacccgactgtgacccaaaa
  G W D G L L A P I L N S K P P D C D P K
aaagttcatcctggaagttcagttgaaggagactgtggtaacccatctgttggaatattc
  K V H P G S S V E G D C G N P S V G I F
tactttgttagttatatcatcatatccttcctggttgtggtgaacatgtacattgcagtc
  Y F V S Y I I I S F L V V V N M Y I A V
atactggagaattttagtgttgccactgaagaaagtactgaacctctgagtgaggatgac
  I L E N P S V A T E E S T E P L S E D D
tttgagatgttctatgaggtttgggagaagtttgatcccgatgcgacccagtttatagag
  F E M F Y E V W E K F D P D A T Q F I E
ttctctaaactctctgattttgcagctgccctggatcctcctcttctcatagcaaaaccc
  F S K L S D F A A A L D P P L L I A K P
aacaaagtccagctcattgccatggatctgcccatggttagtggtgaccggatccattgt
  N K V Q L I A M D L P M V S G D R I H C
cttgacatcttatttgcttttacaaagcgtgttttgggtgagagtggggagatggattct
  L D I L F A F T K R V L G E S G E M D S
cttcgttcacagatggaagaaaggttcatgtctgcaaatccttccaaagtgtcctatgaa
  L R S Q M E E R F M S A N P S K V S Y E
cccatcacaaccacactaaaacggaaacaagaggatgtgtctgctactgtcattcagcgt
  P I T T T L K R K Q E D V S A T V I Q R
gcttatagacgttaccgcttaaggcaaaatgtcaaaaatatatcaagtatatacataaaa
  A Y R R Y R L R Q N V K N I S S I Y I K
gatggagacagagatgatgatttactcaataaaaaagatatggcttttgataatgttaat
  D G D R D D D L L N K K D M A F D N V N
gagaactcaagtccagaaaaaacagatgccacttcatccaccacctctccaccttcatat
  E N S S P E K T D A T S S T T S P P S Y
gatagtgtaacaaagccagacaaagagaaatatgaacaagacagaacagaaaaggaagac
  D S V T K P D K E K Y E Q D R T E K E D
aaagggaaagacagcaaggaaagcaaaaaatagagcttcatttttgatatattgtttaca (SEQ ID NO: 2433)
  K G K D S K E S K K - (SEQ ID NO: 244)
```

[0212] Human SOMA gene sequence. Includes open reading frames (capitalized) and introns (lowercase, abridged). Underlined bases are predicted to disrupt the splicing of the RNA transcript, leading to diminished expression of functional protein. The start codon is also highlighted in bold.

CGGGGCTGCTACCTCCACGGGCGCGCCCTGGCAGGAGGGGCGCAGTCTGC
TTGCAGGCGGTCGCCAGCGCTCCAGCGGCGGCTGTCGGCTTTCCAATTCC
GCCAGCTCGGCTGAGGCTGGGCTAGCCTGGGTGCCAGTGGCTGCTAGCGG
CAGGCGTCCCCTGAGCAACAGGAGCCCAGAGAAAAAGAAGCAGCCCTGAG
AGAGCGCCGGGGAAGGAGAGGCCCGCGCCCTCTCCTGGAGCCAGATTCTG
CAGGTGCACTGGGTGGGGATGATCGGCGGGCTAGGTTGCAAgtaagtgcc
ttttcttttgctgcttctgtggggaggggaggagaagccctcggtctttc
...intron 1...
tttatgttgttattattagtttttaatgggcctttcttggcaggcaaata
gttaagtctttatttctttgtttccatccagGCCTCTTATGTGAGGAGCT
GAAGAGGAATTAAAATATACAGGATGAAAAGATGGCAATGTTGCCTCCCC
CAGGACCTCAGAGCTTTGTCCATTTCACAAAACAGTCTCTTGCCCTCATT
GAACAACGCATTGCTGAAAGAAAATCAAAGGAACCCAAAGAAGAAAAGAA
AGATGATGATGAAGAAGCCCCAAAGCCAAGCAGTGACTTGGAAGCTGGCA
AACAGCTGCCCTTCATCTATGGGGACATTCCTCCCGGCATGGTGTCAGAG
CCCCTGGAGGACTTGGACCCCTACTATGCAGACAAAAAGgtgagtttatt
ttgacttcagtggtcagtttctgttggcttccttctgtataaaaattatt
...intron 2...
atattgatgtgaaaaattgatattttggattctcaatttcatcctttctt
tttcctcctgcagACTTTCATAGTATTGAACAAAGGGAAAACAATCTTCC
GTTTCAATGCCACACCTGCTTTATATATGCTTTCTCCTTTCAGTCCTCTA
AGAAGAATATCTATTAAGATTTTAGTACACTCatatccttttaaaaatga
ttacatccagtggcactttatggtgtaatttttgctattttattcaaata
...intron 3...
cccactgtcgtctcttttgttccttgattctaagctacCTTATTCAGCAT
GCTCATCATGTGCACTATTCTGACAAACTGCATATTTATGACCATGAATA
ACCCACCGGACTGGACCAAAAATGTCGAgtaagtgggtataagtacattt
taatatagttttggtattatcatttcatcctttccttttcctgccaggaa
...intron 4...
ttataaagatttacatggtggttgtattcttttcacatctagtatcccaa
tggaatcttgtgtttagGTACACTTTTACTGGAATATATACTTTTGAATC
ACTTGTAAAAATCCTTGCAAGAGGCTTCTGTGTAGGAGAATTCACTTTTC
TTCGTGACCCGTGGAACTGGCTGGATTTTGTCGTCATTGTTTTTGCgtaa
gtactttcagctttttgaaacggcaaatttatgaaaatctcaggcagcac
...intron 5...
tcaggtaagtatcatagactctatctaaattctgaataattctgatttaa
ttctacagGTATTTAACAGAATTTGTAAACCTAGGCAATGTTTCAGCTCT
TCGAACTTTCAGAGTATTGAGAGCTTTGAAAACTATTTCTGTAATCCCAG
gtaagaagtaattggtgtgaagcattaggccactcataactccaactatt
...intron 6...
atgtcattacaaacacttttttctcccattttcagGCCTGAAGACAATTG
TAGGGGCTTTGATCCAGTCAGTGAAGAAGCTTTCTGATGTCATGATCCTG
ACTGTGTTCTGTCTGAGTGTGTTTGCACTAATTGGACTACAGCTGTTCAT
GGGAAACCTGAAGCATAAATGTTTTCGAAATTCACTTGAAAATAATGAAA
CATTAGAAAGCATAATGAATACCCTAGAGAGTGAAGAAGACTTTAGAAgt
aagaatgtccttgcatttgttattaggttgaaataatgctaaaaacattg
...intron 7...
attaatttacctcctttatcacaatcacagattaaagtctgtgatgttat
aactgttcaaattcttcttcaacagAATATTTTTATTACTTGGAAGGATC
CAAAGATGCTCTCCTTTGTGGTTTCAGCACAGATTCAGggtatgtaatat
ttgttttctttttagtctaaaggctgaaagagaaggaaaagaatgttcag
...intron 8...
cagtaaggctatttagcttgtgtcctgaagacactctcacctataatgtt
ctttctcgtgtgtagTCAGTGTCCAGAGGGGTACACCTGTGTGAAAATTG
GCAGAAACCCTGATTATGGCTACACGAGCTTTGACACTTTCAGCTGGGCC
TTCTTAGCCTTGTTTAGGCTAATGACCCAAGATTACTGGGAAAACCTTTA
CCAACAGgtgagtaccaagagaaacatgcattgtatttttgaatggcata
...intron 9...
tgtacctggtgtatgttaagagcctgtattaggaggttttttatttattt
aaaaactttttattgttcaaatgacaatttccatttttccctagACGCTG
CGTGCTGCTGGCAAAACCTACATGATCTTCTTTGTCGTAGTGATTTTCCT
GGGCTCCTTTTATCTAATAAACTTGATCCTGGCTGTGGTTGCCATGGCAT
ATGAAGAACAGAACCAGGCAAACATTGAAGAAGCTAAACAGAAAGAATTA
GAATTTCAACAGATGTTAGACCGTCTTAAAAAAGAGCAAGAAGAAGCTGA
Ggtactgttatttgatttaaaattcttcctagaggtagaaatgcaaacgg
...intron 10...
tgtcctagggtttcctaggatttggaaatgactcatttaagtgttaacgt
cttggcccaaccagGCAATTGCAGCGGCAGCGGCTGAATATACAAGTATT
AGGAGAAGCAGAATTATGGGCCTCTCAGAGAGTTCTTCTGAAACATCCAA
ACTGAGCTCTAAAAGTGCTAAAGAAAGAAGAAACAGAAGAAAGAAAAAGA
ATCAAAAGAAGCTCTCCAGTGGAGAGGAAAAGGGAGATGCTGAGAAATTG
TCGAAATCAGAATCAGAGGACAGCATCAGAAGAAAAAGTTTCCACCTTGG
TGTCGAAGGGCATAGGCGAGCACATGAAAAGAGGTTGTCTACCCCCAATC
AGgtaccacccaaattgctaaatgtgtatcacccgaggcagaatgctaga
...intron 11...
atatgaagtgtacttctatcagtaggtgcttcagcaaccacgtttttttt
aatttttctgcagTCACCACTCAGCATTCGTGGCTCCTTGTTTTCTGCAA
GGCGAAGCAGCAGAACAAGTCTTTTTAGTTTCAAAGGCAGAGGAAGAGAT
ATAGGATCTGAGACTGAATTTGCCGATGATGAGCACAGCATTTTTGGAGA
CAATGAGAGCAGAAGGGGCTCACTGTTTGTGCCCCACAGACCCCAGGAGC
GACGCAGCAGTAACATCAGCCAAGCCAGTAGGTCCCCACCAATGCTGCCG
GTGAACGGGAAAATGCACAGTGCTGTGGACTGCAACGGTGTGGTCTCCCT
GGTTGATGGACGCTCAGCCCTCATGCTCCCCAATGGACAGCTTCTGCCAG
AGgtgataatagataaggcaacttctgatgacagcgtaaggacgttttac
ctatataagcaagattttatcttatacctacaatttattaggattctgtt
...intron 12...
cttaagacattaattgattttttttttagGGCACGACCAATCAAATACAC
AAGAAAAGGCGTTGTAGTTCCTATCTCCTTTCAGAGGATATGCTGAATGA
TCCCAACCTCAGACAGAGAGCAATGAGTAGAGCAAGCATATTAACAAACA
CTGTGGAAGgtatgtaataatcttcttttactgtacagattcttaaataa
...intron 13...
agacaaatggctgactccatgttctctgcttttttctcccagAACTTGAA
GAGTCCAGACAAAAATGTCCACCTTGGTGGTACAGATTTGCACACAAATT
CTTGATCTGGAATTGCTCTCCATATTGGATAAAATTCAAAAAGTGTATCT
ATTTTATTGTAATGGATCCTTTTGTAGATCTTGCAATTACCATTTGCATA
GTTTTAAACACATTATTTATGGCTATGGAACACCACCCAATGACTGAGGA
ATTCAAAAATGTACTTGCTATAGGAAATTTGgtaagtctcttattgtgtg
ttatgtactcatagtttctctttttagttgtcatcattgtcatttcatat
...intron 14...
aacagtgattattatcattgtgttgatttcctgttttctaatattaacag
aaaaacattatttttctcacttagGTCTTTACTGGAATCTTTGCAGCTGA
AATGGTATTAAAACTGATTGCCATGGATCCATATGAGTATTTCCAAGTAG
GCTGGAATATTTTTGACAGCCTTATTGTGACTTTAAGTTTAGTGGAGCTC
TTTCTAGCAGATGTGGAAGGATTGTCAGTTCTGCGATCATTCAGACTGgt
aaacataaactaaggttgccattatattctataataaaggggtatttctt
...intron 15...
gaaaagattttcatagtgattaacattaaactttatatttgcttttagCT
CCGAGTCTTCAAGTTGGCAAAATCCTGGCCAACATTGAACATGCTGATTA
AGATCATTGGTAACTCAGTAGGGGCTCTAGGTAACCTCACCTTAGTGTTG
GCCATCATCGTCTTCATTTTTGCTGTGGTCGGCATGCAGCTCTTTGGTAA
GAGCTACAAAGAATGTGTCTGCAAGATCAATGATGACTGTACGCTCCCAC
GGTGGCACATGAACGACTTCTTCCACTCCTTCCTGATTGTGTTCCGCGTG
CTGTGTGGAGAGTGGATAGAGACCATGTGGGACTGTATGGAGGTCGCTGG
TCAAGCTATGTGCCTTATTGTTTACATGATGGTCATGGTCATTGGAAACC
TGGTGgtatgtaaccagatgttcatgcattttaatttctctgtggaaatt
...intron 16...
attttattttttatatttcctgtctccctatttctctaccccctctcccc
accctgatatagGTCCTAAACCTATTTCTGGCCTTATTATTGAGCTCATT
TAGTTCAGACAATCTTACAGCAATTGAAGAAGACCCTGATGCAAACAACC
TCCAGATTGCAGTGACTAGAATTAAAAAGGGAATAAATTATGTGAAACAA
ACCTTACGTGAATTTATTCTAAAAGCATTTTCCAAAAAGCCAAAGATTTC
CAGGGAGATAAGACAAGCAGAAGATCTGAATACTAAGAAGGAAAACTATA
TTTCTAACCATACACTTGCTGAAATGAGCAAAGGTCACAATTTCCTCAAG
GAAAAAGATAAAATCAGTGGTTTTGGAAGCAGCGTGGACAAACACTTGAT
GGAAGACAGTGATGGTCAATCATTTATTCACAATCCCAGCCTCACAGTGA
CAGTGCCAATTGCACCTGGGGAATCCGATTTGGAAAATATGAATGCTGAG
GAACTTAGCAGTGATTCGGATAGTGAATACAGCAAAGTGgtaagaatgct
tcatatactttgtgtttcatattaacaattagtatgaaatgaatgaaaat
...intron 17...
tttgaatgaactctaaatgaactacctggtggggtggtgaattcctttct
agAGATTAAACCGGTCAAGCTCCTCAGAGTGCAGCACAGTTGATAACCCT
TTGCCTGGAGAAGGAGAAGAAGCAGAGGCTGAACCTATGAATTCCGATGA
GCCAGAGGCCTGTTTCACAGATGgtaagacaaaaattgagaccttggtta
gcattccttaattagtgttctggggtttgtcttaacgcctaatacttacc
...intron 18...
caagatttaacatgcatgtctttcttgtcagGTTGTGTATGGAGGTTCTC
ATGCTGCCAAGTTAACATAGAGTCAGGGAAAGGAAAAATCTGGTGGAACA
TCAGGAAAACCTGCTACAAGATTGTTGAACACAGTTGGTTTGAAAGCTTC
ATTGTCCTCATGATCCTGCTCAGCAGTGGTGCCCTGgtaaatgatctgac
acctaagtcaatatattgattaagtcaatattctttaaaatgagctaaaa
...intron 19...
tcctgttttttttaaatgaatcatgaagcttaagttgtgcatgattgaaa
cttgaatattatttccacagGCTTTTGAAGATATTTATATTGAAAGGAAA
AAGACCATTAAGATTATCCTGGAGTATGCAGACAAGATCTTCACTTACAT
CTTCATTCTGGAAATGCTTCTAAAATGGATAGCATATGGTTATAAAACAT
ATTTCACCAATGCCTGGTGTTGGCTGGATTTCCTAATTGTTGATgtaggt
acttttgagtacattttaaaagaggatttattcttactgtgtgttgtgaa
...intron 20...
agtttcagaattgactttttccttttatgcttcatcattttattgacaca
attaatgaaaatgttatttttatagGTTTCTTTGGTTACTTTAGTGGCAA
ACACTCTTGGCTACTCAGATCTTGGCCCCATTAAATCCCTTCGGACACTG
AGAGCTTTAAGACCTCTAAGAGCCTTATCTAGATTTGAAGGAATGAGGgt
aagaaaatactaaactttataatgttcttattttttaatggggtttaaaa
...intron 21...
ctttcatgttgcctatttaacatcttactaatcctaatcatgcttttctt
tcttttgaatactagGTCGTTGTGAATGCACTCATAGGAGCAATTCCTTC
CATCATGAATGTGCTACTTGTGTGTCTTATATTCTGGCTGATATTCAGCA
TCATGGGAGTAAATTTGTTTGCTGGCAAGTTCTATGAGTGTATTAACACC
ACAGATGGGTCACGGTTTCCTGCAAGTCAAGTTCCAAATCGTTCCGAATG
TTTTGCCCTTATGAATGTTAGTCAAAATGTGCGATGGAAAAACCTGAAAG
TGAACTTTGATAATGTCGGACTTGGTTACCTATCTCTGCTTCAAGTTgta
agtgtcccatttcatgagtgcttggtattttaatagatattggacgaagg
...intron 22...
tctgtttatggctattttagaatatgagcttaacattcaaattctattaa
tgttattcttaaagGCAACTTTTAAGGGATGGACGATTATTATGTATGCA
GCAGTGGATTCTGTTAATgtaagtattgattatcttagcactaaacttta
tttttaaaagcttcttagtttatttcagtgatttccaaactataacttca
...intron 23...
tccatataatgctaacttttgtaaattttatagGTAGACAAGCAGCCCAA
ATATGAATATAGCCTCTACATGTATATTTATTTTGTCGTCTTTATCATCT
TTGGGTCATTCTTCACTTTGAACTTGTTCATTGGTGTCATCATAGATAAT
TTCAACCAACAGAAAAAGAAGataagtatttcaaatatttttcattgtaa
...intron 24...
tttagtaatctatagaaagatgtagacaatgattctggttttaactacat
ttattttttgtttgtttctttacCTTGGAGGTCAAGACATCTTTATGACA
GAAGAACAGAAGAAATACTATAATGCAATGAAAAAGCTGGGGTCCAAGAA
GCCACAAAAGCCAATTCCTCGACCAGGGgtaaaaaaatatatatatcttt
agcatatagattttcaaattatttctaattcatttttaatgcacatcttt
...intron 25...
aatttctggataatacttgaaaagtttactctgcattcgatattattctt
atttctttgcagAACAAAATCCAAGGATGTATATTTGACCTAGTGACAAA
TCAAGCCTTTGATATTAGTATCATGGTTCTTATCTGTCTCAACATGGTAA
CCATGATGGTAGAAAAGGAGGGTCAAAGTCAACATATGACTGAAGTTTTA
TATTGGATAAATGTGGTTTTTATAATCCTTTTCACTGGAGAATGTGTGCT
AAAACTGATCTCCCTCAGACACTACTACTTCACTGTAGGATGGAATATTT
TTGATTTTGTGGTTGTGATTATCTCCATTGTAGgtaagaatatttatttt
tcagattttattttttgagtaaagctaaacttcacttatgctcaaggaag
...intron 26...
(SEQ ID NO: 2435)
ctgtttagagtcatcatttcaggtagcatacatctttaaatattttattt
ctattattttcctccacatacagGTATGTTTCTAGCTGATTTGATTGAAA
CGTATTTTGTGTCCCCTACCCTGTTCCGAGTGATCCGTCTTGCCAGGATT
GGCCGAATCCTACGTCTAGTCAAAGGAGCAAAGGGGATCCGCACGCTGCT
CTTTGCTTTGATGATGTCCCTTCCTGCGTTGTTTAACATCGGCCTCCTGC
TCTTCCTGGTCATGTTCATCTACGCCATCTTTGGAATGTCCAACTTTGCC
TATGTTAAAAAGGAAGATGGAATTAATGACATGTTCAATTTTGAGACCTT
TGGCAACAGTATGATTTGCCTGTTCCAAATTACAACCTCTGCTGGCTGGG
ATGGATTGCTAGCACCTATTCTTAACAGTAAGCCACCCGACTGTGACCCA
AAAAAAGTTCATCCTGGAAGTTCAGTTGAAGGAGACTGTGGTAACCCATC
TGTTGGAATATTCTACTTTGTTAGTTATATCATCATATCCTTCCTGGTTG
TGGTGAACATGTACATTGCAGTCATACTGGAGAATTTTAGTGTTGCCACT
GAAGAAAGTACTGAACCTCTGAGTGAGGATGACTTTGAGATGTTCTATGA
GGTTTGGGAGAAGTTTGATCCCGATGCGACCCAGTTTATAGAGTTCTCTA
AACTCTCTGATTTTGCAGCTGCCCTGGATCCTCCTCTTCTCATAGCAAAA
CCCAACAAAGTCCAGCTCATTGCCATGGATCTGCCCATGGTTAGTGGTGA
CCGGATCCATTGTCTTGACATCTTATTTGCTTTTACAAAGCGTGTTTTGG
GTGAGAGTGGGGAGATGGATTCTCTTCGTTCACAGATGGAAGAAAGGTTC
ATGTCTGCAAATCCTTCCAAAGTGTCCTATGAACCCATCACAACCACACT
AAAACGGAAACAAGAGGATGTGTCTGCTACTGTCATTCAGCGTGCTTATA
GACGTTACCGCTTAAGGCAAAATGTCAAAAATATATCAAGTATATACATA
AAAGATGGAGACAGAGATGATGATTTACTCAATAAAAAAGATATGGCTTT
TGATAATGTTAATGAGAACTCAAGTCCAGAAAAAACAGATGCCACTTCAT
CCACCACCTCTCCACCTTCATATGATAGTGTAACAAAGCCAGACAAAGAG
AAATATGAACAAGACAGAACAGAAAAGGAAGACAAAGGGAAAGACAGCAA
GGAAAGCAAAAAATAGAGCTTCATTTTTGATATATTGTTTACAGCCTGTG
AAAGTGATTTATTTGTGTTAATAAAACTCTTTTGAGGAAGTCTATGCCAA
AATCCTTTTTATCAAAATATTCTCGAAGGCAGTGCAGTCACTAACTCTGA
TTTCCTAAGAAAGGTGGGCAGCATTAGCAGATGGTTATTTTTGCACTGAT
GATTCTTTAAGAATCGTAAGAGAACTCTGTAGGAATTATTGATTATAGCA
TACAAAAGTGATTCAGTTTTTTGGTTTTTAATAAATCAGAAGACCATGTA
GAAAACTTTTACATCTGCCTTGTCATCTTTTCACAGGATTGTAATTAGTC
TTGTTTCCCATGTAAATAAACAACACACGCATACAGAAAAATCTATTATT
TATCTATTATTTGGAAATCAACAAAAGTATTTGCCTTGGCTTTGCAATGA
AATGCTTGATAGAAGTAATGGACATTAGTTATGAATGTTTAGTTAAAATG
CATTATTAGGGAGCTTGACTTTTTATCAATGTACAGAGGTTATTCTATAT
TTTGAGGTGCTTAAATTTATTCTACATTGCATCAGAACCAATTTATATGT
GCCTATAAAATGCCATGGGATTAAAAATATATGTAGGCTATTCATTTCTA
CAAATGTTTTTCATTCATCTTGACTCACATGCCAACAAGGATAAGACTTA
CCTTTAGAGTATTGTGTTTCATAGCCTTTCTTCTTTCATATCCCTTTTTG
TTCATAGAATAACCACAGAACTTGAAAAATTATTCTAAGTACATATTACA
CTCCTCAAAAAAAACAAAGATAACTGAGAAAAAAGTTATTGACAGAAGTT
CTATTTGCTATTATTTACATAGCCTAACATTTGACTGTGCTGCCCAAAAT
ACTGATAATAGTCTCTTAAACTCTTTTGTCAAATTTTCCTGCTTTCTTAT
GCAGTATTGTTTAGTCATCCTTTCGCTGTAAGCAAAGTTGATGAAATCCT
TCCTGATATGCAGTTAGTTGTTTGACCACGGTACATACTTGAGCAGATAA
TAACTTGGGCACAGTATTTATTGCATCACTTGTATACAATCCCGTGTTTG
GCAAGCTTTCAAATCATGTAATATGACAGACTTTACACAGATATGTGTTT
AGTATGAATAAAAAAGCATTGAAATAGGGATTCTTGCCAACTTGCTCTCT
TGCCACCAACTTACTTTCCTAAATTATGGAAGTAATCTTTTTTGGATATA
CTTCAATGTATACAATGAGGAAGATGTCACCTTCTCCTTAAAATTCTATG
ATGTGAAATATATTTTGCCTCAATCAACACAGTACCATGGGCTTCTAATT
TATCAAGCACATATTCATTTTGCATTAGCTGTAGACATCTAGTTTTTTGA
AAACACCTATTAATAGTAATTTGAAAAGAAATAACCATAATGCTTTTTTT
CGTGAGTTTATTTCAGGAATATGAGATCTTTCTTCTATAAAGTTATTCAT
GCACAGGCAAAAATTGAGCTACACAGGTAGAATGTAGTTTTACTTAGAAG
ATTTTTGTGGGAGGTTTTGAAGCAAATATATAAAACAACTTTCACTAATT
TGCTTTCCATATTTAAAAAATAATAAATTACATTTATATAATAAATGTTT
AAAGCACATATTTTTTGTTGTTCTGGCAATTTAAAAAGAAAGAGGATTTA
AACGTACCTATAGAAACAAAGATTTATGGTTAAAGAATGAGATCAGAAGT
CTAGAATGTTTTTAAATTGTGATATATTTTACAACATCCGTTATTACTTT
GAGACATTTGTCCTAATCTACGTATAAAACTCAATCTAGGGCTAAAGATT
CTTTATACCATCTTAGGTTCATTCATCTTAGGCTATTTGAACCACTTTTT
AATTTAATATGAAAGACACCATGCAGTGTTTTCCGAGACTACATAGATCA
TTTTATCACATACCTACCAAGCCTGTTGGAAATAGGTTTTGATAATTTAA
GTAGGGACCTATACAAAATATATTACATTTATCAGATTTTTAAATACATT
CAATTAAGAATTTAACATCACCTTAAATTTGAATTCAATCTACCGTTATT
TCAAACTCACAAATATAACTGCATTATGAATACTTACATAATGTAGTAAG
ACAAGATGTTTGACAGGTTCGTGTGTAATTTTCTATTAATGTTTTTACAT
TGCCTTGTTTTTATGTAAAATAAAAAATATGGGCAACTGGTTTGTTAACA
ACACAATTTCTTCTTAGCATTTCAAAAATATATATAAAGTTGTTCTTTTT
CCTATTTCATGAACTATGTTTTTTTTTAAAATAACATGGTTAAGTTTTAT
ATATATTTACGTTTGTTTCAGGAATGTCTACTTGTGACTTTTTATCAATT
AAAAATAATATTTGGAAGAAAGAGCTTATTAAGTATAAGCTTGAAGTAAA
ATTAGACCTCTCTTTCCATGTAGATTACTGTTTGTACTGATGGTTTCACC
CTTCAGAAGGCACTGTCATATTAATATTTAAATTTTATAATCGCTGAACT
TATTACACCCAACAATACAGAAAGGCAGTTACACTGAAGAACTTAACTTA
GAATAAAATGGAAGCAAACAGGTTTTCTAAAAACTTTTTTAAGTGACCAG
GTCTCGCTCTGTCACCCAGGCTAGAGTGCAATGGCATGATCATAGCTCTC
TGCAGCCTCAACTCTGGGCTCAAGCAACCCTCCTGCCTCAGCCTCCCAAG
TAGCTAAGACTACAGGTACATGCCACCATGCCTGGCTAATATTTAAATTT
TTGTAGATAAGGGGTCTTGCTATGTTGCCCAGGCTAGTCTCAAACTCCTG
GCTTCAAGTGTTCCTACTGTCATGACCTGCCAACATGCTGGGGTTACAGG
CATGAGCCACCATGCCCCAAACAGGTTTGAACACAAATCTTTCGGATGAA
AATTAGAGAACCTAATTTTAGCTTTTTGATAGTTACCTAGTTTGCAAAAG
ATTTGGGTGACTTGTGAGCTGTTTTTAAATGCTGATTGTTGAACATCACA
ACCCAAAATACTTAGCATGATTTTATAGAGTTTTGATAGCTTTATTAAAA
AGAGTGAAAATAAAATGCATATGTAAATAAAGCAGTTCTAAATAGCTATT
TCAGAGAAATGTTAATAGAAGTGCTGAAAGAAGGGCCAACTAAATTAGGA
TGGCCAGGGAATTGGCCTGGGTTTAGGACCTATGTATGAAGGCCACCAAT
TTTTTAAAAATATCTGTGGTTTATTATGTTATTATCTTCTTGAGGAAAAC
AATCAAGAATTGCTTCATGAAAATAAATAAATAGCCATGAATATCATAAA
GCTGTTTACATAGGATTCTTTACAAATTTCATAGATCTATGAATGCTCAA
AATGTTTGAGTTTGCCATAAATTATATTGTAGTTATATTGTAGTTATACT
TGAGACTGACACATTGTAATATAATCTAAGAATAAAAGTTATACAAAATA
A
SCN10A (Uniprot #: Q9Y5Y9)
Synonyms: NaV1.8, PN3, hPN3
(SEQ ID NO: 2436)
MEFPIGSLETNNFRRFTPESLVEIEKQIAAKQGTKKAREKHREQKDQEEKPRPQLDLKACNQLPKFYGE
LPAELIGEPLEDLDPFYSTHRTFMVLNKGRTISRFSATRALWLFSPFNLIRRTAIKVSVHSWFSLFITVTIL
VNCVCMTRTDLPEKIEYVFTVIYTFEALIKILARGFCLNEFTYLRDPWNWLDFSVITLAYVGTAIDLRGI
SGLRTFRVLRALKTVSVIPGLKVIVGALIHSVKKLADVTILTIFCLSVFALVGLQLFKGNLKNKCVKND
MAVNETTNYSSHRKPDIYINKRGTSDPLLCGNGSDSGHCPDGYICLKTSDNPDFNYTSFDSFAWAFLSL
FRLMTQDSWERLYQQTLRTSGKIYMIFFVLVIFLGSFYLVNLILAVVTMAYEEQNQATTDEIEAKEKKF
QEALEMLRKEQEVLAALGIDTTSLHSHNGSPLTSKNASERRHRIKPRVSEGSTEDNKSPRSDPYNQRRM
SFLGLASGKRRASHGSVFHFRSPGRDISLPEGVTDDGVFPGDHESHRGSLLLGGGAGQQGPLPRSPLPQP
SNPDSRHGEDEHQPPPTSELAPGAVDVSAFDAGQKKTFLSAEYLDEPFRAQRAMSVVSIITSVLEELEES
EQKCPPCLTSLSQKYLIWDCCPMWVKLKTILFGLVTDPFAELTITLCIVVNTIFMAMEHHGMSPTFEAM
LQIGNIVFTIFFTAEMVFKIIAFDPYYYFQKKWNIFDCIIVTVSLLELGVAKKGSLSVLRSFRLLRVFKLA
KSWPTLNTLIKIIGNSVGALGNLTIILAIIVFVFALVGKQLLGENYRNNRKNISAPHEDWPRWHMHDFFH
SFLIVFRILCGEWIENMWACMEVGQKSICLILFLTVMVLGNLVVLNLFIALLLNSFSADNLTAPEDDGEV
NNLQVALARIQVFGHRTKQALCSFFSRSCPFPQPKAEPELVVKLPLSSSKAENHIAANTARGSSGGLQAP
RGPRDEHSDFIANPTVWVSVPIAEGESDLDDLEDDGGEDAQSFQQEVIPKGQQEQLQQVERCGDHLTP
RSPGTGTSSEDLAPSLGETWKDESVPQVPAEGVDDTSSSEGSTVDCLDPEEILRKIPELADDLEEPDDCF
TEGCIRHCPCCKLDTTKSPWDVGWQVRKTCYRIVEHSWFESFIIFMILLSSGSLAFEDYYLDQKPTVKA
LLEYTDRVFTFIFVFEMLLKWVAYGFKKYFTNAWCWLDFLIVNISLISLTAKILEYSEVAPIKALRTLRA
LRPLRALSRFEGMRVVVDALVGAIPSIMNVLLVCLIFWLIFSIMGVNLFAGKFWRCINYTDGEFSLVPLS
IVNNKSDCKIQNSTGSFFWVNVKVNFDNVAMGYLALLQVATFKGWMDIMYAAVDSREVNMQPKWE
DNVYMYLYFVIFIIFGGFFTLNLFVGVIIDNFNQQKKKLGGQDIFMTEEQKKYYNAMKKLGSKKPQKPI
PRPLNKFQGFVFDIVTRQAFDITIMVLICLNMITMMVETDDQSEEKTKILGKINQFFVAVFTGECVMKM
FALRQYYFTNGWNVFDFIVVVLSIASLIFSAILKSLQSYFSPTLFRVIRLARIGRILRLIRAAKGIRTLLFAL
MMSLPALFNIGLLLFLVMFIYSIFGMSSFPHVRWEAGIDDMFNFQTFANSMLCLFQITTSAGWDGLLSPI
LNTGPPYCDPNLPNSNGTRGDCGSPAVGIIFFTTYIIISFLIMVNMYIAVILENFNVATEESTEPLSEDDFD
MFYETWEKFDPEATQFITFSALSDFADTLSGPLRIPKPNRNILIQMDLPLVPGDKIHCLDILFAFTKNVLG
ESGELDSLKANMEEKFMATNLSKSSYEPIATTLRWKQEDISATVIQKAYRSYVLHRSMALSNTPCVPRA
ELEAASLPDEGFVAFTANENCVLPDKSETASATSFPPSYESVTRGLSDRVNMRTSSSIQNEDEATSMELI
APGP
SCN11A (Uniprot #: Q9UI33)
Synonyms: NaV1.9, PN5, SCN12A, SN52, hNaN
(SEQ ID NO: 2437)
MDDRCYPVIFPDERNFRPFTSDSLAAIEKRIAIQKEKKKSKDQTGEVPQPRPQLDLKASRKLPKLYGDIP
RELIGKPLEDLDPFYRNHKTFMVLNRKRTIYRFSAKHALFIFGPFNSIRSLAIRVSVHSLFSMFIIGTVIINC
VFMATGPAKNSNSNNTDIALCVFTGIYIFEALIKILARGFILDEFSFLRDPWNWLDSIVIGIAIVSYIPGITI
KLLPLRTFRVFRALKAISVVSRLKVIVGALLRSVKKLVNVIILTFFCLSIFALVGQQLFMGSLNLKCISRD
CKNISNPEAYDHCFEKKENSPEFKMCGIWMGNSACSIQYECKHTKINPDYNYTNFDNFGWSFLAMFRL
MTQDSWEKLYQQTLRTTGLYSVFFFIVVIFLGSFYLINLTLAVVTMAYEEQNKNVAAEIEAKEKMFQE
AQQLLKEEKEALVAMGIDRSSLTSLETSYFTPKKRKLFGNKKRKSFFLRESGKDQPPGSDSDEDCQKKP
QLLEQTKRLSQNLSLDHFDEHGDPLQRQRALSAVSILTITMKEQEKSQEPCLPCGENLASKYLVWNCCP
QWLCVKKVLRTVMTDPFTELAITICIIINTVFLAMEHHKMEASFEKMLNIGNLVFTSIFIAEMCLKIIALD
PYHYFRRGWNIFDSIVALLSFADVMNCVLQKRSWPFLRSFRVLRVFKLAKSWPTLNTLIKIIGNSVGAL
GSLTVVLVIVIFIFSVVGMQLFGRSFNSQKSPKLCNPTGPTVSCLRHWHMGDFWHSFLVVFRILCGEWIE
NMWECMQEANASSSLCVIVFILITVIGKLVVLNLFIALLLNSFSNEERNGNLEGEARKTKVQLALDRFR
RAFCFVRHTLEHFCHKWCRKQNLPQQKEVAGGCAAQSKDIIPLVMEMKRGSETQEELGILTSVPKTLG
VRHDWTWLAPLAELEDDVEFSGEDNAQRITQPEPEQQAYELHQENKKPTSQRVQSVEIDMFSEDEPHL
TIQDPRKKSDVTSILSECSTIDLQDGFGWLPEMVPKKQPERCLPKGFGCCFPCCSVDKRKPPWVIWWNL
RKTCYQIVKHSWFESFIIFVILLSSGALIFEDVHLENQPKIQELLNCTDIIFTHIFILEMVLKWVAFGFGKY
FTSAWCCLDFIIVIVSVTTLINLMELKSFRTLRALRPLRALSQFEGMKVVVNALIGAIPAILNVLLVCLIF
WLVFCILGVYFFSGKFGKCINGTDSVINYTIITNKSQCESGNFSWINQKVNFDNVGNAYLALLQVATFK
GWMDIIYAAVDSTEKEQQPEFESNSLGYIYFVVFIIFGSFFTLNLFIGVIIDNFNQQQKKLGG
QDIFMTEEQKKYYNAMKKLGSKKPQKPIPRPLNKCQGLVFDIVTSQIFDIIIISLIILNM
ISMMAESYNQPKAMKSILDHLNWVFVVIFTLECLIKIFALRQYYFTNGWNLFDCVVVLLSIVSTMISTLE
NQEHIPFPPTLFRIVRLARIGRILRLVRAARGIRTLLFALMMSLPSLFNIGLLLFLIMFIYAILGMNWFSKV
NPESGIDDIFNFKTFASSMLCLFQISTSAGWDSLLSPMLRSKESCNSSSENCHLPGIATSYFVSYIIISFLIV
VNMYIAVILENFNTATEESEDPLGEDDFDIFYEVWEKFDPEATQFIKYSALSDFADALPEPLRVAKPNKY
QFLVMDLPMVSEDRLHCMDILFAFTARVLGGSDGLDSMKAMMEEKFMEANPLKKLYEPIVTTTKRKE
EERGAAIIQKAFRKYMMKVTKGDQGDQNDLENGPHSPLQTLCNGDLSSFGVAKGKVHCD
SCN3A (Uniprot #: Q9NY46)
Synonyms: NaV1.3, KIAA1356, NAC3
(SEQ ID NO: 2438)
MAQALLVPPGPESFRLFTRESLAAIEKRAALEKAKKPKKEQDNDDENKPKPNSDLEAGKNLPFIYGDIP
PEMVSEPLEDLDPYYINKKTFIVMNKGKAIFRFSATSALYILTPLNPVRKIAIKILVHSLFSMLIMCTILTN
CVFMTLSNPPDWTKNVEYTFTGIYTFESLIKILARGFCLEDFTFLRDPWNWLDFSVIVMAYVTEFVSLG
NVSALRTFRVLRALKTISVIPGLKTIVGALIQSVKKLSDVMILTVFCLSVFALIGLQLFMGNLRNKCLQW
PPSDSAFETNTTSYFNGTMDSNGTFVNVTMSTFNWKDYIGDDSHFYVLDGQKDPLLCGNGSDAGQCP
EGYICVKAGRNPNYGYTSFDTFSWAFLSLFRLMTQDYWENLYQLTLRAAGKTYMIFFVLVIFLGSFYL
VNLILAVVAMAYEEQNQATLEEAEQKEAEFQQMLEQLKKQQEEAQAVAAASAASRDFSGIGGLGELL
ESSSEASKLSSKSAKEWRNRRKKRRQREHLEGNNKGERDSFPKSESEDSVKRSSFLFSMDGNRLTSDKK
FCSPHQSLLSIRGSLFSPRRNSKTSIFSFRGRAKDVGSENDFADDEHSTFEDSESRRDSLFVPHRHGERRN
SNVSQASMSSRMVPGLPANGKMHSTVDCNGVVSLVGGPSALTSPTGQLPPEGTTTETEVRKRRLSSYQ
ISMEMLEDSSGRQRAVSIASILTNTMEELEESRQKCPPCWYRFANVFLIWDCCDAWLKVKHLVNLIVM
DPFVDLAITICIVLNTLFMAMEHYPMTEQFSSVLTVGNLVFTGIFTAEMVLKIIAMDPYYYFQEGWNIFD
GIIVSLSLMELGLSNVEGLSVLRSFRLLRVFKLAKSWPTLNMLIKIIGNSVGALGNLTLVLAIIVFIFAVV
GMQLFGKSYKECVCKINDDCTLPRWHMNDFFHSFLIVFRVLCGEWIETMWDCMEVAGQTMCLIVFML
VMVIGNLVVLNLFLALLLSSFSSDNLAATDDDNEMNNLQIAVGRMQKGIDYVKNKMRECFQKAFFRK
PKVIEIHEGNKIDSCMSNNTGIEISKELNYLRDGNGTTSGVGTGSSVEKYVIDENDYMSFINNPSLTVTVP
IAVGESDFENLNTEEFSSESELEESKEKLNATSSSEGSTVDVVLPREGEQAETEPEEDLKPEACFTEGCIK
KFPFCQVSTEEGKGKIWWNLRKTCYSIVEHNWFETFIVFMILLSSGALAFEDIYIEQRKTIKTMLEYADK
VFTYIFILEMLLKWVAYGFQTYFTNAWCWLDFLIVDVSLVSLVANALGYSELGAIKSLRTLRALRPLRA
LSRFEGMRVVVNALVGAIPSIMNVLLVCLIFWLIFSIMGVNLFAGKFYHCVNMTTGNMFDISDVNNLSD
CQALGKQARWKNVKVNFDNVGAGYLALLQVATFKGWMDIMYAAVDSRDVKLQPVYEENLYMYLY
FVIFIIFGSFFTLNLFIGVIIDNFNQQKKKFGGQDIFMTEEQKKYYNAMKKLGSKKPQKPIPRPANKFQG
MVFDFVTRQVFDISIMILICLNMVTMMVETDDQGKYMTLVLSRINLVFIVLFTGEFVLKLVSLRHYYFTI
GWNIFDFVVVILSIVGMFLAEMIEKYFVSPTLFRVIRLARIGRILRLIKGAKGIRTLLFALMMSLPALFNIG
LLLFLVMFIYAIFGMSNFAYVKKEAGIDDMFNFETFGNSMICLFQITTSAGWDGLLAPILNSAPPDCDPD
TIHPGSSVKGDCGNPSVGIFFFVSYIIISFLVVVNMYIAVILENFSVATEESAEPLSEDDFEMFYEVWEKF
DPDATQFIEFSKLSDFAAALDPPLLIAKPNKVQLIAMDLPMVSGDRIHCLDILFAFTKRVLGESGEMDAL
RIQMEDRFMASNPSKVSYLPITTTLKRKQEEVSAAIIQRNFRCYLLKQRLKNISSNYNKLAIKGRIDLPIK
QDMIIDKLNGNSTPEKTDGSSSTTSPPSYDSVTKPDKEKFEKDKPEKESKGKEVRENQK
CACNA1H (Uniprot #: O95180)
Synonyms: CaV3.2, CAC1H
(SEQ ID NO: 2439)
MTEGARAADEVRVPLGAPPPGPAALVGASPESPGAPGREAERGSELGVSPSESPAAERGAELGADEEQ
RVPYPALAATVFFCLGQTTRPRSWCLRLVCNPWFEHVSMLVIMLNCVTLGMFRPCEDVECGSERCNIL
EAFDAFIFAFFAVEMVIKMVALGLFGQKCYLGDTWNRLDFFIVVAGMMEYSLDGHNVSLSAIRTVRVL
RPLRAINRVPSMRILVTLLLDTLPMLGNVLLLCFFVFFIFGIVGVQLWAGLLRNRCFLDSAFVRNNNLTF
LRPYYQTEEGEENPFICSSRRDNGMQKCSHIPGRRELRMPCTLGWEAYTQPQAEGVGAARNACINWN
QYYNVCRSGDSNPHNGAINFDNIGYAWIAIFQVITLEGWVDIMYYVMDAHSFYNFIYFILLIIVGSFFMI
NLCLVVIATQFSETKQRESQLMREQRARHLSNDSTLASFSEPGSCYEELLKYVGHIFRKVKRRSLRLYA
RWQSRWRKKVDPSAVQGQGPGHRQRRAGRHTASVHHLVYHHHHHHHHHYHFSHGSPRRPGPEPGA
CDTRLVRAGAPPSPPSPGRGPPDAESVHSIYHADCHIEGPQERARVAHAAATAAASLRLATGLGTMNY
PTILPSGVGSGKGSTSPGPKGKWAGGPPGTGGHGPLSLNSPDPYEKIPHVVGEHGLGQAPGHLSGLSVP
CPLPSPPAGTLTCELKSCPYCTRALEDPEGELSGSESGDSDGRGVYEFTQDVRHGDRWDPTRPPRATDT
PGPGPGSPQRRAQQRAAPGEPGWMGRLWV
TFSGKLRRIVDSKYFSRGIMMAILVNTLSMGVEYHEQPEELTNALEISNIVFTSMFALEMLLKLLACGPL
GYIRNPYNIFDGIIVVISVWEIVGQADGGLSVLRTFRLLRVLKLVRFLPALRRQLVVLVKTMDNVATFC
TLLMLFIFIFSILGMHLFGCKFSLKTDTGDTVPDRKNFDSLLWAIVTVFQILTQEDWNVVLYNGMASTSS
WAALYFVALMTFGNYVLFNLLVAILVEGFQAEGDANRSDTDEDKTSVHFEEDFHKLRELQTTELKMC
SLAVTPNGHLEGRGSLSPPLIMCTAATPMPTPKSSPFLDAAPSLPDSRRGSSSSGDPPLGDQKPPASLRSS
PCAPWGPSGAWSSRRSSWSSLGRAPSLKRRGQCGERESLLSGEGKGSTDDEAEDGRAAPGPRATPLRR
AESLDPRPLRPAALPPTKCRDRDGQVVALPSDFFLRIDSHREDAAELDDDSEDSCCLRLHKVLEPYKPQ
WCRSREAWALYLFSPQNRFRVSCQKVITHKMFDHVVLVFIFLNCVTIALERPDIDPGSTERVFLSVSNYI
FTAIFVAEMMVKVVALGLLSGEHAYLQSSWNLLDGLLVLVSLVDIVVAMASAGGAKILGVLRVLRLL
RTLRPLRVISRAPGLKLVVETLISSLRPIGNIVLICCAFFIIFGILGVQLFKGKFYYCEGPDTRNISTKAQCR
AAHYRWVRRKYNFDNLGQALMSLFVLSSKDGWVNIMYDGLDAVGVDQQPVQNHNPWMLLYFISFL
LIVSFFVLNMFVGVVVENFHKCRQHQEALEARRREEKRLRRLERRRRSTFPSPEAQRRPYYADYSPTRR
SIHSLCTSHYLDLFITFIICVNVITMSMEHYNQPKSLDEALKYCNYVFTIVFVFEAALKLVAFGFRRFFKD
RWNQLDLAIVLLSLMGITLEEIEMSAALPINPTIIRIMRVLRIARVLKLLKMATGMRALLDTVVQALPQV
GNLGLLFMLLFFIYAALGVELFGRLECSEDNPCEGLSRHATFSNFGMAFLTLFRVSTGDNWNGIMKDTL
RECSREDKHCLSYLPALSPVYFVTFVLVAQFVLVNVVVAVLMKHLEESNKEAREDAELDAEIELEMAQ
GPGSARRVDADRPPLPQESPGARDAPNLVARKVSVSRMLSLPNDSYMFRPVVPASAPHPRPLQEVEME
TYGAGTPLGSVASVHSPPAESCASLQIPLAVSSPARSGEPLHALSPRGTARSPSLSRLLCRQEAVHTDSLE
GKIDSPRDTLDPAEPGEKTPVRPVTQGGSLQSPPRSPRPASVRTRKHTFGQRCVSSRPAAPGGEEAEASD
PADEEVSHITSSACPWQPTAEPHGPEASPVAGGERDLRRLYSVDAQGFLDKPGRADEQWRPSAELGSG
EPGEAKAWGPEAEPALGARRKKKMSPPCISVEPPAEDEGSARPSAAEGGSTTLRRRTPSCEATPHRDSL
EPTEGSGAGGDPAAKGERWGQASCRAEHLTVPSFAFEPLDLGVPSGDPFLDGSHSVTPESRASSSGAIV
PLEPPESEPPMPVGDPPEKRRGLYLTVPQCPLEKPGSPSATPAPGGGADDPV
HCN1 (Uniprot #: O60741)
Synonyms: BCNG1
(SEQ ID NO: 2440)
MEGGGKPNSSSNSRDDGNSVFPAKASATGAGPAAAEKRLGTPPGGGGAGAKEHGNSVCFKVDGGGG
GGGGGGGGEEPAGGFEDAEGPRRQYGFMQRQFTSMLQPGVNKFSLRMFGSQKAVEKEQERVKTAGF
WIIHPYSDFRFYWDLIMLIMMVGNLVIIPVGITFFTEQTTTPWIIFNVASDTVFLLDLIMNFRTGTVNEDS
SEIILDPKVIKMNYLKSWFVVDFISSIPVDYIFLIVEKGMDSEVYKTARALRIVRFTKILSLLRLLRLSRLIR
YIHQWEEIFHMTYDLASAVVRIFNLIGMMLLLCHWDGCLQFLVPLLQDFPPDCWVSLNEMVNDSWGK
QYSYALFKAMSHMLCIGYGAQAPVSMSDLWITMLSMIVGATCYAMFVGHATALIQSLDSSRRQYQEK
YKQVEQYMSFHKLPADMRQKIHDYYEHRYQGKIFDEENILNELNDPLREEIVNFNCRKLVATMPLFAN
ADPNFVTAMLSKLRFEVFQPGDYIIREGAVGKKMYFIQHGVAGVITKSSKEMKLTDGSYFGEICLLTKG
RRTASVRADTYCRLYSLSVDNFNEVLEEYPMMRRAFETVAIDRLDRIGKKNSILLQKFQKDLNTGVFN
NQENEILKQIVKHDREMVQAIAPINYPQMTTLNSTSSTTTPTSRMRTQSPPVYTATSLSHSNLHSPSPSTQ
TPQPSAILSPCSYTTAVCSPPVQSPLAARTFHYASPTASQLSLMQQQPQQQVQQSQPPQTQPQQPSPQPQ
TPGSSTPKNEVHKSTQALHNTNLTREVRPLSASQPSLPHEVSTLISRPHPTVGESLASIPQPVTAVPGTGL
QAGGRSTVPQRVTLFRQMSSGAIPPNRGVPPAPPPPAAALPRESSSVLNTDPDAEKPRFASNL
HCN2 (Uniprot #: Q9UL51)
Synonyms:BCNG2
(SEQ ID NO: 2441)
MDARGGGGRPGESPGATPAPGPPPPPPPAPPQQQPPPPPPPAPPPGPGPAPPQHPPRAEALPPEAADEGGP
RGRLRSRDSSCGRPGTPGAASTAKGSPNGECGRGEPQCSPAGPEGPARGPKVSFSCRGAASGPAPGPGP
ALEAGSEEAGPAGEPRGSQASFMQRQFGALLQPGVNKFSLRMFGSQKAVEREQERVKSAGAWIIHPYS
DFRFYWDFTMLLFMVGNLIIIPVGITFFKDETTAPWIVFNVVSDTFFLMDLVLNFRTGIVIEDNTEIILDPE
KIKKKYLRTWFVVDFVSSIPVDYIFLIVEKGIDSEVYKTARALRIVRFTKILSLLRLLRLSRLIRYIHQWEE
IFHMTYDLASAVMRICNLISMMLLLCHWDGCLQFLVPMLQDFPRNCWVSINGMVNHSWSELYSFALF
KAMSHMLCIGYGRQAPESMTDIWLTMLSMIVGATCYAMFIGHATALIQSLDSSRRQYQEKYKQVEQY
MSFHKLPADFRQKIHDYYEHRYQGKMFDEDSILGELNGPLREEIVNFNCRKLVASMPLFANADPNFVT
AMLTKLKFEVFQPGDYIIREGTIGKKMYFIQHGVVSVLTKGNKEMKLSDGSYFGEICLLTRGRRTASVR
ADTYCRLYSLSVDNFNEVLEEYPMMRRAFETVAIDRLDRIGKKNSILLHKVQHDLNSGVFNNQENAIIQ
EIVKYDREMVQQAELGQRVGLFPPPPPPPQVTSAIATLQQAAAMSFCPQVARPLVGPLALGSPRLVRRP
PPGPAPAAASPGPPPPASPPGAPASPRAPRTSPYGGLPAAPLAGPALPARRLSRASRPLSASQPSLPHGAP
GPAASTRPASSSTPRLGPTPAARAAAPSPDRRDSASPGAAGGLDPQDSARSRLSSNL
ANO1 (Uniprot #: Q5XXA6)
Synonyms: DOG1, ORAOV2, TAOS2, TMEM16A
(SEQ ID NO: 2442)
MRVNEKYSTLPAEDRSVHIINICAIEDIGYLPSEGTLLNSLSVDPDAECKYGLYFRDGRRKVDYILVYHH
KRPSGNRTLVRRVQHSDTPSGARSVKQDHPLPGKGASLDAGSGEPPMDYHEDDKRFRREEYEGNLLE
AGLELERDEDTKIHGVGFVKIHAPWNVLCREAEFLKLKMPTKKMYHINETRGLLKKINSVLQKITDPIQ
PKVAEHRPQTMKRLSYPFSREKQHLFDLSDKDSFFDSKTRSTIVYEILKRTTCTKAKYSMGITSLLANGV
YAAAYPLHDGDYNGENVEFNDRKLLYEEWARYGVFYKYQPIDLVRKYFGEKIGLYFAWLGVYTQML
IPASIVGIIVFLYGCATMDENIPSMEMCDQRHNITMCPLCDKTCSYWKMSSACATARASHLFDNPATVF
FSVFMALWAATFMEHWKRKQMRLNYRWDLTGFEEEEEAVKDHPRAEYEARVLEKSLKKESRNKEKR
RHIPEESTNKWKQRVKTAMAGVKLTDKVKLTWRDRFPAYLTNLVSIIFMIAVTFAIVLGVIIYRISMAA
ALAMNSSPSVRSNIRVTVTATAVIINLVVIILLDEVYGCIARWLTKIEVPKTEKSFEERLIFKAFLLKFVNS
YTPIFYVAFFKGRFVGRPGDYVYIFRSFRMEECAPGGCLMELCIQLSIIMLGKQLIQNNLFEIGIPKMKKL
IRYLKLKQQSPPDHEECVKRKQRYLVDYNLEPFAGLTPLYMEMIIQFGFVTLFVASFPLAPLFALLNNIIE
IRLDAKKFVTELRRPVAVRAKDIGIWYNILRGIGKLAVIINAFVISFTSDFIPRLVYLYMYSKNGTMHGF
VNHTLSSFNVSDFQNGTAPNDPLDLGYEVQICRYKDYREPPWSENKYDISKDFWAVLAARLAFVIVFQ
NLVMFMSDFVDWVIPDIPKDISQQIHKEKVLMVELFMREEQDKQQLLETWMEKERQKDEPPC
NHHNTKACPDSLGSPAPSHAYHGGVL

### Example 3: C to T Base Editing to Introduce a Premature Stop Codon in Mouse Neuro-2a Cells

[0213] On day 1, a culture of mouse Neuro-2a cells (ATCC) was resuspended using trypsin (TrypLE), and diluted to 1.25×10⁵ cells/mL with DMEM supplemented with 10% FBS and no antibiotics. This suspension of cells (250 μL) was used to seed a 48-well plate coated with poly-D-Lysine, and incubated at 37° C. with 5% CO₂ for 24 hours. On day 2, each well was treated with a cationic lipid-DNA complex comprising 1.5 μL Lipofectamine 3000 and 1 μL of P3000 Reagent (ThermoFisher Scientific), 750 ng of base editor and 250 ng of sgRNA expression plasmids prepared as per the manufacturer's recommendation in a total volume of 25 μL DMEM. The base editing expression vector used the base editor 4 (BE4) architecture as described in Komor et al. 2017.⁵¹ The sgRNA expression plasmid contained the protospacer RNA sequence and the S. pyogenes guide-RNA scaffold driven by a U6 promoter. The transfected Neuro-2a cells were incubated for 72 hours in the same media. On day 5, the cells were resuspended with trypsin (TrypLE), centrifuged, and the cell pellets were washed three times with PBS. The cells were treated with 75 μL of lysis buffer (comprising: 10 mM Tris-HCl pH 8, 0.05% sodium dodecyl sulfate, 25 ug/mL Proteinase K) and incubated at 37° C. for 1 hour in a thermocycler, followed by 80° C. for 20 minutes. The lysate was diluted 1:25 in water, and the target genomic loci were PCR amplified for high-throughput DNA sequencing as described in Komor et al. 2016.⁵² See FIGS. 4-6 for non-limiting examples of the results obtained from C→T base editing treatments using guide-RNAs targeted to the NaV1.7/SCN9A gene in the mouse Neuro-2a cell line.

### REFERENCES

[0214] 1 Waxman, S. G. & Zamponi, G. W. Regulating excitability of peripheral afferents: emerging ion channel targets. Nature neuroscience 17, 153-163, (2014).
[0215] 2 Guedon, J. M. et al. Current gene therapy using viral vectors for chronic pain. Molecular pain 11, 27, (2015).
[0216] 3 Kumar, S., Ruchi, R., James, S. R. & Chidiac, E. J. Gene therapy for chronic neuropathic pain: how does it work and where do we stand today? Pain Med 12, 808-822, (2011).
[0217] 4 Sapunar, D., Kostic, S., Banozic, A. & Puljak, L. Dorsal root ganglion—a potential new therapeutic target for neuropathic pain. Journal of pain research 5, 31-38, (2012).
[0218] 5 Komor, A. C., Kim, Y. B., Packer, M. S., Zuris, J. A. & Liu, D. R. Programmable editing of a target base in genomic DNA without double-stranded DNA cleavage. Nature 533, 420-424, (2016).
[0219] 6 Cong, L. et al. Multiplex genome engineering using CRISPR/Cas systems. Science 339, 819-823, (2013).
[0220] 7 Jinek, M. et al. A programmable dual-RNA-guided DNA endonuclease in adaptive bacterial immunity. Science 337, 816-821, (2012).
[0221] 8 Mali, P. et al. RNA-guided human genome engineering via Cas9. Science 339, 823-826, (2013).
[0222] 9 Ran, F. A. et al. Double nicking by RNA-guided CRISPR Cas9 for enhanced genome editing specificity. Cell 154, 1380-1389, (2013).
[0223] 10 Guilinger, J. P., Thompson, D. B. & Liu, D. R. Fusion of catalytically inactive Cas9 to Fok1 nuclease improves the specificity of genome modification. Nature biotechnology 32, 577-582, (2014).
[0224] 11 Tsai, S. Q. et al. Dimeric CRISPR RNA-guided Fok1 nucleases for highly specific genome editing. Nature Biotechnology 32, 569-576, (2014).
[0225] 12 Zetsche, B. et al. Cpf1 is a single RNA-guided endonuclease of a class 2 CRISPR-Cas system. Cell 163, 759-771, (2015).
[0226] 13 Gao, F., Shen, X. Z., Jiang, F., Wu, Y. & Han, C. DNA-guided genome editing using the Natronobacterium gregoryi Argonaute. Nature Biotechnology 34, 768-773, (2016).
[0227] 14 Cradick, T. J., Fine, E. J., Antico, C. J. & Bao, G. CRISPR/Cas9 systems targeting β-globin and CCR5 genes have substantial off-target activity. Nucleic acids research, (2013).
[0228] 15 Holt, N. et al. Human hematopoietic stem/progenitor cells modified by zinc-finger nucleases targeted to CCR5 control HIV-1 in vivo. Nature Biotechnology 28, 839-847, (2010).
[0229] 16 Shen, Y. & Nemunaitis, J. Herpes simplex virus 1 (HSV-1) for cancer treatment. Cancer gene therapy 13, 975-992, (2006).
[0230] 17 Smith, G. Herpesvirus transport to the nervous system and back again. Annual review of microbiology 66, 153-176, (2012).
[0231] 18 Burton, E. A., Fink, D. J. & Glorioso, J. C. Gene delivery using herpes simplex virus vectors. DNA and cell biology 21, 915-936, (2002).
[0232] 19 Kay, M. A., Glorioso, J. C. & Naldini, L. Viral vectors for gene therapy: the art of turning infectious agents into vehicles of therapeutics. Nature medicine 7, 33-40, (2001).
[0233] 20 Epstein, A. L. HSV-1-based amplicon vectors: design and applications. Gene therapy 12 Suppl 1, S154-158, (2005).
[0234] 21 Steiner, I., Kennedy, P. G. & Pachner, A. R. The neurotropic herpes viruses: herpes simplex and varicella-zoster. The Lancet. Neurology 6, 1015-1028, (2007).
[0235] 22 Lancaster, K. Z. & Pfeiffer, J. K. Limited trafficking of a neurotropic virus through inefficient retrograde axonal transport and the type I interferon response. PLoS pathogens 6, e1000791, (2010).
[0236] 23 Hotta, H. [Neurotropic viruses—classification, structure and characteristics]. Nihon rinsho. Japanese journal of clinical medicine 55, 777-782, (1997).
[0237] 24 Kleinstiver, B. P. et al. High-fidelity CRISPR-Cas9 nucleases with no detectable genome-wide off-target effects. Nature 529, 490-495, (2016).
[0238] 25 Slaymaker, I. M. et al. Rationally engineered Cas9 nucleases with improved specificity. Science 351, 84-88, (2016).
[0239] 26 Pattanayak, V. et al. High-throughput profiling of off-target DNA cleavage reveals RNA-programmed Cas9 nuclease specificity. Nature biotechnology 31, 839-843, (2013).
[0240] 27 Wu, X. et al. Genome-wide binding of the CRISPR endonuclease Cas9 in mammalian cells. Nature Biotechnology 32, 670-676, (2014).
[0241] 28 Hsu, P. D. et al. DNA targeting specificity of RNA-guided Cas9 nucleases. Nature biotechnology 31, 827-832, (2013).
[0242] 29 Davis, K. M., Pattanayak, V., Thompson, D. B., Zuris, J. A. & Liu, D. R. Small Molecule-Triggered Cas9 Protein With Improved Genome-Editing Specificity. Nature Chemical Biology in press, (2015).
[0243] 30 Lee, J. H. et al. A monoclonal antibody that targets a NaV1.7 channel voltage sensor for pain and itch relief. Cell 157, 1393-1404, (2014).
[0244] 31 Bagal, S. K. et al. Recent progress in sodium channel modulators for pain. Bioorganic & medicinal chemistry letters 24, 3690-3699, (2014).
[0245] 32 King, G. F. & Vetter, I. No gain, no pain: NaV1.7 as an analgesic target. ACS chemical neuroscience 5, 749-751, (2014).
[0246] 33 Martz, L. Targeting Nav1.7 in pain and itch. Science-Business eXchange 7, (2014, doi:10.1038/scibx.2014.662).
[0247] 34 Cox, J. J. et al. An SCN9A channelopathy causes congenital inability to experience pain. Nature 444, 894-898, (2006).
[0248] 35 Cox, J. J. et al. Congenital insensitivity to pain: novel SCN9A missense and in-frame deletion mutations. Human mutation 31, E1670-1686, (2010).
[0249] 36 Goldberg, Y. P. et al. Loss-of-function mutations in the Nav1.7 gene underlie congenital indifference to pain in multiple human populations. Clinical genetics 71, 311-319, (2007).
[0250] 37 Yang, Y. et al. Mutations in SCN9A, encoding a sodium channel alpha subunit, in patients with primary erythermalgia. Journal of medical genetics 41, 171-174, (2004).
[0251] 38 Leipold, E. et al. A de novo gain-of-function mutation in SCN11A causes loss of pain perception. Nature genetics 45, 1399-1404, (2013).
[0252] 39 Weiss, J. et al. Loss-of-function mutations in sodium channel Nav1.7 cause anosmia. Nature 472, 186-190, (2011).
[0253] 40 Devigili, G. et al. Paroxysmal itch caused by gain-of-function Nav1.7 mutation. Pain 155, 1702-1707, (2014).
[0254] 41 Woods, C. G., Babiker, M. O., Horrocks, I., Tolmie, J. & Kurth, I. The phenotype of congenital insensitivity to pain due to the NaV1.9 variant p.L811P. European journal of human genetics: EJHG 23, 561-563, (2015).
[0255] 42 Bourinet, E. et al. Silencing of the Cav3.2 T-type calcium channel gene in sensory neurons demonstrates its major role in nociception. The EMBO journal 24, 315-324, (2005).
[0256] 43 Cho, H. et al. The calcium-activated chloride channel anoctamin 1 acts as a heat sensor in nociceptive neurons. Nature neuroscience 15, 1015-1021, (2012).
[0257] 44 Andre, S. et al. Axotomy-induced expression of calcium-activated chloride current in subpopulations of mouse dorsal root ganglion neurons. Journal of neurophysiology 90, 3764-3773, (2003).
[0258] 45 Benarroch, E. E. HCN channels: function and clinical implications. Neurology 80, 304-310, (2013).
[0259] 46 Emery, E. C., Young, G. T., Berrocoso, E. M., Chen, L. & McNaughton, P. A. HCN2 ion channels play a central role in inflammatory and neuropathic pain. Science 333, 1462-1466, (2011).
[0260] 47 Shalem, O., Sanjana, N. E. & Zhang, F. High-throughput functional genomics using CRISPR-Cas9. Nature reviews. Genetics 16, 299-311, (2015).
[0261] 48 Chen, S. et al. Genome-wide CRISPR screen in a mouse model of tumor growth and metastasis. Cell 160, 1246-1260, (2015).
[0262] 49 Kleinstiver, B. P. et al. Engineered CRISPR-Cas9 nucleases with altered PAM specificities. Nature 523, 481-485, (2015).
[0263] 50 Doench, J. G. et al. Optimized sgRNA design to maximize activity and minimize off-target effects of CRISPR-Cas9. Nature biotechnology 34, 184-191, (2016).
[0264] 51 Komor, A. C. et al. Improved base excision repair inhibition and bacteriophage Mu Gam protein yields C:G-toT:A base editors with higher efficiency and product purity. Science Advances 3, eaao4774, (2017).
[0265] 52 Komor, A. C. et al. Programmable editing of a target base in genomic DNA without double-stranded DNA cleavage. Nature 533, 420-424 (2016).

### EQUIVALENTS AND SCOPE

[0266] In the claims articles such as “a,” “an,” and “the” may mean one or more than one unless indicated to the contrary or otherwise evident from the context. Claims or descriptions that include “or” between one or more members of a group are considered satisfied if one, more than one, or all of the group members are present in, employed in, or otherwise relevant to a given product or process unless indicated to the contrary or otherwise evident from the context. The invention includes embodiments in which exactly one member of the group is present in, employed in, or otherwise relevant to a given product or process. The invention includes embodiments in which more than one, or all of the group members are present in, employed in, or otherwise relevant to a given product or process.

[0267] Furthermore, the invention encompasses all variations, combinations, and permutations in which one or more limitations, elements, clauses, and descriptive terms from one or more of the listed claims is introduced into another claim. For example, any claim that is dependent on another claim can be modified to include one or more limitations found in any other claim that is dependent on the same base claim. Where elements are presented as lists, e.g., in Markush group format, each subgroup of the elements is also disclosed, and any element(s) can be removed from the group. It should it be understood that, in general, where the invention, or aspects of the invention, is/are referred to as comprising particular elements and/or features, certain embodiments of the invention or aspects of the invention consist, or consist essentially of, such elements and/or features. For purposes of simplicity, those embodiments have not been specifically set forth in haec verba herein.

[0268] It is also noted that the terms “comprising” and “containing” are intended to be open and permits the inclusion of additional elements or steps. Where ranges are given, endpoints are included. Furthermore, unless otherwise indicated or otherwise evident from the context and understanding of one of ordinary skill in the art, values that are expressed as ranges can assume any specific value or sub-range within the stated ranges in different embodiments of the invention, to the tenth of the unit of the lower limit of the range, unless the context clearly dictates otherwise.

[0269] This application refers to various issued patents, published patent applications, journal articles, and other publications, all of which are incorporated herein by reference. If there is a conflict between any of the incorporated references and the instant specification, the specification shall control. In addition, any particular embodiment of the present invention that falls within the prior art may be explicitly excluded from any one or more of the claims. Because such embodiments are deemed to be known to one of ordinary skill in the art, they may be excluded even if the exclusion is not set forth explicitly herein. Any particular embodiment of the invention can be excluded from any claim, for any reason, whether or not related to the existence of prior art.

[0270] Those skilled in the art will recognize or be able to ascertain using no more than routine experimentation many equivalents to the specific embodiments described herein. The scope of the present embodiments described herein is not intended to be limited to the above Description, but rather is as set forth in the appended claims. Those of ordinary skill in the art will appreciate that various changes and modifications to this description may be made without departing from the spirit or scope of the present invention, as defined in the following claims.

The application's sequence listing, which the Patent Office published only in electronic form, follows.

SEQUENCE LISTING (2466 sequences)

SEQ ID NO: 1 - protein, 1368 aa, Streptococcus pyogenes [sequence omitted]

SEQ ID NO: 2 - protein, 1368 aa, Streptococcus pyogenes
MDKKYSIGLAIGTNSVGWAVITDEYKVPSKKFKVLGNTDRHSIKKNLIGALLFDSGETAEATRLKRTARRRYTRRKNRICYLQEIFSNEMAKVDDSFFHRLEESFLVEEDKKHERHPIFGNIVDEVAYHEKYPTIYHLRKKLVDSTDKADLRLIYLALAHMIKFRGHFLIEGDLNPDNSDVDKLFIQLVQTYNQLFEENPINASGVDAKAILSARLSKSRRLENLIAQLPGEKKNGLFGNLIALSLGLTPNFKSNFDLAEDAKLQLSKDTYDDDLDNLLAQIGDQYADLFLAAKNLSDAILLSDILRVNTEITKAPLSASMIKRYDEHHQDLTLLKALVRQQLPEKYKEIFFDQSKNGYAGYIDGGASQEEFYKFIKPILEKMDGTEELLVKLNREDLLRKQRTFDNGSIPHQIHLGELHAILRRQEDFYPFLKDNREKIEKILTFRIPYYVGPLARGNSRFAWMTRKSEETITPWNFEEVVDKGASAQSFIERMTNFDKNLPNEKVLPKHSLLYEYFTVYNELTKVKYVTEGMRKPAFLSGEQKKAIVDLLFKTNRKVTVKQLKEDYFKKIECFDSVEISGVEDRFNASLGTYHDLLKIIKDKDFLDNEENEDILEDIVLTLTLFEDREMIEERLKTYAHLFDDKVMKQLKRRRYTGWGRLSRKLINGIRDKQSGKTILDFLKSDGFANRNFMQLIHDDSLTFKEDIQKAQVSGQGDSLHEHIANLAGSPAIKKGILQTVKVVDELVKVMGRHKPENIVIEMARENQTTQKGQKNSRERMKRIEEGIKELGSQILKEHPVENTQLQNEKLYLYYLQNGRDMYVDQELDINRLSDYDVDAIVPQSFLKDDSIDNKVLTRSDKNRGKSDNVPSEEVVKKMKNYWRQLLNAKLITQRKFDNLTKAERGGLSELDKAGFIKRQLVETRQITKHVAQILDSRMNTKYDENDKLIREVKVITLKSKLVSDFRKDFQFYKVREINNYHHAHDAYLNAVVGTALIKKYPKLESEFVYGDYKVYDVRKMIAKSEQEIGKATAKYFFYSNIMNFFKTEITLANGEIRKRPLIETNGETGEIVWDKGRDFATVRKVLSMPQVNIVKKTEVQTGGFSKESILPKRNSDKLIARKKDWDPKKYGGFDSPTVAYSVLVVAKVEKGKSKKLKSVKELLGITIMERSSFEKNPIDFLEAKGYKEVKKDLIIKLPKYSLFELENGRKRMLASAGELQKGNELALPSKYVNFLYLASHYEKLKGSPEDNEQKQLFVEQHKHYLDEIIEQISEFSKRVILADANLDKVLSAYNKHRDKPIREQAENIIHLFTLTNLGAPAAFKYFDTTIDRKRYTSTKEVLDATLIHQSITGLYETRIDLSQLGGD

SEQ ID NO: 3 - protein, 1368 aa, Streptococcus pyogenes
MDKKYSIGLAIGTNSVGWAVITDEYKVPSKKFKVLGNTDRHSIKKNLIGALLFDSGETAEATRLKRTARRRYTRRKNRICYLQEIFSNEMAKVDDSFFHRLEESFLVEEDKKHERHPIFGNIVDEVAYHEKYPTIYHLRKKLVDSTDKADLRLIYLALAHMIKFRGHFLIEGDLNPDNSDVDKLFIQLVQTYNQLFEENPINASGVDAKAILSARLSKSRRLENLIAQLPGEKKNGLFGNLIALSLGLTPNFKSNFDLAEDAKLQLSKDTYDDDLDNLLAQIGDQYADLFLAAKNLSDAILLSDILRVNTEITKAPLSASMIKRYDEHHQDLTLLKALVRQQLPEKYKEIFFDQSKNGYAGYIDGGASQEEFYKFIKPILEKMDGTEELLVKLNREDLLRKQRTFDNGSIPHQIHLGELHAILRRQEDFYPFLKDNREKIEKILTFRIPYYVGPLARGNSRFAWMTRKSEETITPWNFEEVVDKGASAQSFIERMTNFDKNLPNEKVLPKHSLLYEYFTVYNELTKVKYVTEGMRKPAFLSGEQKKAIVDLLFKTNRKVTVKQLKEDYFKKIECFDSVEISGVEDRFNASLGTYHDLLKIIKDKDFLDNEENEDILEDIVLTLTLFEDREMIEERLKTYAHLFDDKVMKQLKRRRYTGWGRLSRKLINGIRDKQSGKTILDFLKSDGFANRNFMQLIHDDSLTFKEDIQKAQVSGQGDSLHEHIANLAGSPAIKKGILQTVKVVDELVKVMGRHKPENIVIEMARENQTTQKGQKNSRERMKRIEEGIKELGSQILKEHPVENTQLQNEKLYLYYLQNGRDMYVDQELDINRLSDYDVDHIVPQSFLKDDSIDNKVLTRSDKNRGKSDNVPSEEVVKKMKNYWRQLLNAKLITQRKFDNLTKAERGGLSELDKAGFIKRQLVETRQITKHVAQILDSRMNTKYDENDKLIREVKVITLKSKLVSDFRKDFQFYKVREINNYHHAHDAYLNAVVGTALIKKYPKLESEFVYGDYKVYDVRKMIAKSEQEIGKATAKYFFYSNIMNFFKTEITLANGEIRKRPLIETNGETGEIVWDKGRDFATVRKVLSMPQVNIVKKTEVQTGGFSKESILPKRNSDKLIARKKDWDPKKYGGFDSPTVAYSVLVVAKVEKGKSKKLKSVKELLGITIMERSSFEKNPIDFLEAKGYKEVKKDLIIKLPKYSLFELENGRKRMLASAGELQKGNELALPSKYVNFLYLASHYEKLKGSPEDNEQKQLFVEQHKHYLDEIIEQISEFSKRVILADANLDKVLSAYNKHRDKPIREQAENIIHLFTLTNLGAPAAFKYFDTTIDRKRYTSTKEVLDATLIHQSITGLYETRIDLSQLGGD

SEQ ID NO: 4 - protein, 1053 aa, Streptococcus pyogenes
MKRNYILGLAIGITSVGYGIIDYETRDVIDAGVRLFKEANVENNEGRRSKRGARRLKRRRRHRIQRVKKLLFDYNLLTDHSELSGINPYEARVKGLSQKLSEEEFSAALLHLAKRRGVHNVNEVEEDTGNELSTKEQISRNSKALEEKYVAELQLERLKKDGEVRGSINRFKTSDYVKEAKQLLKVQKAYHQLDQSFIDTYIDLLETRRTYYEGPGEGSPFGWKDIKEWYEMLMGHCTYFPEELRSVKYAYNADLYNALNDLNNLVITRDENEKLEYYEKFQIIENVFKQKKKPTLKQIAKEILVNEEDIKGYRVTSTGKPEFTNLKVYHDIKDITARKEIIENAELLDQIAKILTIYQSSEDIQEELTNLNSELTQEEIEQISNLKGYTGTHNLSLKAINLILDELWHTNDNQIAIFNRLKLVPKKVDLSQQKEIPTTLVDDFILSPVVKRSFIQSIKVINAIIKKYGLPNDIIIELAREKNSKDAQKMINEMQKRNRQTNERIEEIIRTTGKENAKYLIEKIKLHDMQEGKCLYSLEAIPLEDLLNNPFNYEVDHIIPRSVSFDNSFNNKVLVKQEENSKKGNRTPFQYLSSSDSKISYETFKKHILNLAKGKGRISKTKKEYLLEERDINRFSVQKDFINRNLVDTRYATRGLMNLLRSYFRVNNLDVKVKSINGGFTSFLRRKWKFKKERNKGYKHHAEDALIIANADFIFKEWKKLDKAKKVMENQMFEEKQAESMPEIETEQEYKEIFITPHQIKHIKDFKDYKYSHRVDKKPNRELINDTLYSTRKDDKGNTLIVNNLNGLYDKDNDKLKKLINKSPEKLLMYHHDPQTYQKLKLIMEQYGDEKNPLYKYYEETGNYLTKYSKKDNGPVIKKIKYYGNKLNAHLDITDDYPNSRNKVVKLSLKPYRFDVYLDNGVYKFVTVKNLDVIKKENYYEVNSKCYEEAKKLKKISNQAEFIASFYNNDLIKINGELYRVIGVNNDLLNRIEVNMIDITYREYLENMNDKRPPRIIKTIASKTQSIKKYSTDILGNLYEVKSKKHPQIIKKG

SEQ ID NO: 5 - DNA, 4107 bp, Streptococcus pyogenes
atggataagaaatactcaataggcttagatatcggcacaaatagcgtcggatgggcggtgatcactgatgaatataaggttccgtctaaaaagttcaaggttctgggaaatacagaccgccacagtatcaaaaaaaatcttataggggctcttttatttgacagtggagagacagcggaagcgactcgtctcaaacggacagctcgtagaaggtatacacgtcggaagaatcgtatttgttatctacaggagattttttcaaatgagatggcgaaagtagatgatagtttctttcatcgacttgaagagtcttttttggtggaagaagacaagaagcatgaacgtcatcctatttttggaaatatagtagatgaagttgcttatcatgagaaatatccaactatctatcatctgcgaaaaaaattggtagattctactgataaagcggatttgcgcttaatctatttggccttagcgcatatgattaagtttcgtggtcattttttgattgagggagatttaaatcctgataatagtgatgtggacaaactatttatccagttggtacaaacctacaatcaattatttgaagaaaaccctattaacgcaagtggagtagatgctaaagcgattctttctgcacgattgagtaaatcaagacgattagaaaatctcattgctcagctccccggtgagaagaaaaatggcttatttgggaatctcattgctttgtcattgggtttgacccctaattttaaatcaaattttgatttggcagaagatgctaaattacagctttcaaaagatacttacgatgatgatttagataatttattggcgcaaattggagatcaatatgctgatttgtttttggcagctaagaatttatcagatgctattttactttcagatatcctaagagtaaatactgaaataactaaggctcccctatcagcttcaatgattaaacgctacgatgaacatcatcaagacttgactcttttaaaagctttagttcgacaacaacttccagaaaagtataaagaaatcttttttgatcaatcaaaaaacggatatgcaggttatattgatgggggagctagccaagaagaattttataaatttatcaaaccaattttagaaaaaatggatggtactgaggaattattggtgaaactaaatcgtgaagatttgctgcgcaagcaacggacctttgacaacggctctattccccatcaaattcacttgggtgagctgcatgctattttgagaagacaagaagacttttatccatttttaaaagacaatcgtgagaagattgaaaaaatcttgacttttcgaattccttattatgttggtccattggcgcgtggcaatagtcgttttgcatggatgactcggaagtctgaagaaacaattaccccatggaattttgaagaagttgtcgataaaggtgcttcagctcaatcatttattgaacgcatgacaaactttgataaaaatcttccaaatgaaaaagtactaccaaaacatagtttgctttatgagtattttacggtttataacgaattgacaaaggtcaaatatgttactgaaggaatgcgaaaaccagcatttctttcaggtgaacagaagaaagccattgttgatttactcttcaaaacaaatcgaaaagtaaccgttaagcaattaaaagaagattatttcaaaaaaatagaatgttttgatagtgttgaaatttcaggagttgaagatagatttaatgcttcattaggtacctaccatgatttgctaaaaattattaaagataaagattttttggataatgaagaaaatgaagatatcttagaggatattgttttaacattgaccttatttgaagatagggagatgattgaggaaagacttaaaacatatgctcacctctttgatgataaggtgatgaaacagcttaaacgtcgccgttatactggttggggacgtttgtctcgaaaattgattaatggtattagggataagcaatctggcaaaacaatattagattttttgaaatcagatggttttgccaatcgcaattttatgcagctgatccatgatgatagtttgacatttaaagaagacattcaaaaagcacaagtgtctggacaaggcgatagtttacatgaacatattgcaaatttagctggtagccctgctattaaaaaaggtattttacagactgtaaaagttgttgatgaattggtcaaagtaatggggcggcataagccagaaaatatcgttattgaaatggcacgtgaaaatcagacaactcaaaagggccagaaaaattcgcgagagcgtatgaaacgaatcgaagaaggtatcaaagaattaggaagtcagattcttaaagagcatcctgttgaaaatactcaattgcaaaatgaaaagctctatctctattatctccaaaatggaagagacatgtatgtggaccaagaattagatattaatcgtttaagtgattatgatgtcgatcacattgttccacaaagtttccttaaagacgattcaatagacaataaggtcttaacgcgttctgataaaaatcgtggtaaatcggataacgttccaagtgaagaagtagtcaaaaagatgaaaaactattggagacaacttctaaacgccaagttaatcactcaacgtaagtttgataatttaacgaaagctgaacgtggaggtttgagtgaacttgataaagctggttttatcaaacgccaattggttgaaactcgccaaatcactaagcatgtggcacaaattttggatagtcgcatgaatactaaatacgatgaaaatgataaacttattcgagaggttaaagtgattaccttaaaatctaaattagtttctgacttccgaaaagatttccaattctataaagtacgtgagattaacaattaccatcatgcccatgatgcgtatctaaatgccgtcgttggaactgctttgattaagaaatatccaaaacttgaatcggagtttgtctatggtgattataaagtttatgatgttcgtaaaatgattgctaagtctgagcaagaaataggcaaagcaaccgcaaaatatttcttttactctaatatcatgaacttcttcaaaacagaaattacacttgcaaatggagagattcgcaaacgccctctaatcgaaactaatggggaaactggagaaattgtctgggataaagggcgagattttgccacagtgcgcaaagtattgtccatgccccaagtcaatattgtcaagaaaacagaagtacagacaggcggattctccaaggagtcaattttaccaaaaagaaattcggacaagcttattgctcgtaaaaaagactgggatccaaaaaaatatggtggttttgatagtccaacggtagcttattcagtcctagtggttgctaaggtggaaaaagggaaatcgaagaagttaaaatccgttaaagagttactagggatcacaattatggaaagaagttcctttgaaaaaaatccgattgactttttagaagctaaaggatataaggaagttaaaaaagacttaatcattaaactacctaaatatagtctttttgagttagaaaacggtcgtaaacggatgctggctagtgccggagaattacaaaaaggaaatgagctggctctgccaagcaaatatgtgaattttttatatttagctagtcattatgaaaagttgaagggtagtccagaagataacgaacaaaaacaattgtttgtggagcagcataagcattatttagatgagattattgagcaaatcagtgaattttctaagcgtgttattttagcagatgccaatttagataaagttcttagtgcatataacaaacatagagacaaaccaatacgtgaacaagcagaaaatattattcatttatttacgttgacgaatcttggagctcccgctgcttttaaatattttgatacaacaattgatcgtaaacgatatacgtctacaaaagaagttttagatgccactcttatccatcaatccatcactggtctttatgaaacacgcattgatttgagtcagctaggaggtgactga

SEQ ID NO: 6 - protein, 1053 aa, Streptococcus Aureus
MKRNYILGLDIGITSVGYGIIDYETRDVIDAGVRLFKEANVENNEGRRSKRGARRLKRRRRHRIQRVKKLLFDYNLLTDHSELSGINPYEARVKGLSQKLSEEEFSAALLHLAKRRGVHNVNEVEEDTGNELSTKEQISRNSKALEEKYVAELQLERLKKDGEVRGSINRFKTSDYVKEAKQLLKVQKAYHQLDQSFIDTYIDLLETRRTYYEGPGEGSPFGWKDIKEWYEMLMGHCTYFPEELRSVKYAYNADLYNALNDLNNLVITRDENEKLEYYEKFQIIENVFKQKKKPTLKQIAKEILVNEEDIKGYRVTSTGKPEFTNLKVYHDIKDITARKEIIENAELLDQIAKILTIYQSSEDIQEELTNLNSELTQEEIEQISNLKGYTGTHNLSLKAINLILDELWHTNDNQIAIFNRLKLVPKKVDLSQQKEIPTTLVDDFILSPVVKRSFIQSIKVINAIIKKYGLPNDIIIELAREKNSKDAQKMINEMQKRNRQTNERIEEIIRTTGKENAKYLIEKIKLHDMQEGKCLYSLEAIPLEDLLNNPFNYEVDHIIPRSVSFDNSFNNKVLVKQEENSKKGNRTPFQYLSSSDSKISYETFKKHILNLAKGKGRISKTKKEYLLEERDINRFSVQKDFINRNLVDTRYATRGLMNLLRSYFRVNNLDVKVKSINGGFTSFLRRKWKFKKERNKGYKHHAEDALIIANADFIFKEWKKLDKAKKVMENQMFEEKQAESMPEIETEQEYKEIFITPHQIKHIKDFKDYKYSHRVDKKPNRELINDTLYSTRKDDKGNTLIVNNLNGLYDKDNDKLKKLINKSPEKLLMYHHDPQTYQKLKLIMEQYGDEKNPLYKYYEETGNYLTKYSKKDNGPVIKKIKYYGNKLNAHLDITDDYPNSRNKVVKLSLKPYRFDVYLDNGVYKFVTVKNLDVIKKENYYEVNSKCYEEAKKLKKISNQAEFIASFYNNDLIKINGELYRVIGVNNDLLNRIEVNMIDITYREYLENMNDKRPPRIIKTIASKTQSIKKYSTDILGNLYEVKSKKHPQIIKKG

SEQ ID NO: 7 - protein, 1388 aa, Streptococcus thermophilus
MTKPYSIGLDIGTNSVGWAVITDNYKVPSKKMKVLGNTSKKYIKKNLLGVLLFDSGITAEGRRLKRTARRRYTRRRNRILYLQEIFSTEMATLDDAFFQRLDDSFLVPDDKRDSKYPIFGNLVEEKVYHDEFPTIYHLRKYLADSTKKADLRLVYLALAHMIKYRGHFLIEGEFNSKNNDIQKNFQDFLDTYNAIFESDLSLENSKQLEEIVKDKISKLEKKDRILKLFPGEKNSGIFSEFLKLIVGNQADFRKCFNLDEKASLHFSKESYDEDLETLLGYIGDDYSDVFLKAKKLYDAILLSGFLTVTDNETEAPLSSAMIKRYNEHKEDLALLKEYIRNISLKTYNEVFKDDTKNGYAGYIDGKTNQEDFYVYLKNLLAEFEGADYFLEKIDREDFLRKQRTFDNGSIPYQIHLQEMRAILDKQAKFYPFLAKNKERIEKILTFRIPYYVGPLARGNSDFAWSIRKRNEKITPWNFEDVIDKESSAEAFINRMTSFDLYLPEEKVLPKHSLLYETFNVYNELTKVRFIAESMRDYQFLDSKQKKDIVRLYFKDKRKVTDKDIIEYLHAIYGYDGIELKGIEKQFNSSLSTYHDLLNIINDKEFLDDSSNEAIIEEIIHTLTIFEDREMIKQRLSKFENIFDKSVLKKLSRRHYTGWGKLSAKLINGIRDEKSGNTILDYLIDDGISNRNFMQLIHDDALSFKKKIQKAQIIGDEDKGNIKEVVKSLPGSPAIKKGILQSIKIVDELVKVMGGRKPESIVVEMARENQYTNQGKSNSQQRLKRLEKSLKELGSKILKENIPAKLSKIDNNALQNDRLYLYYLQNGKDMYTGDDLDIDRLSNYDIDHIIPQAFLKDNSIDNKVLVSSASNRGKSDDFPSLEVVKKRKTFWYQLLKSKLISQRKFDNLTKAERGGLLPEDKAGFIQRQLVETRQITKHVARLLDEKFNNKKDENNRAVRTVKIITLKSTLVSQFRKDFELYKVREINDFHHAHDAYLNAVIASALLKKYPKLEPEFVYGDYPKYNSFRERKSATEKVYFYSNIMNIFKKSISLADGRVIERPLIEVNEETGESVWNKESDLATVRRVLSYPQVNVVKKVEEQNHGLDRGKPKGLFNANLSSKPKPNSNENLVGAKEYLDPKKYGGYAGISNSFAVLVKGTIEKGAKKKITNVLEFQGISILDRINYRKDKLNFLLEKGYKDIELIIELPKYSLFELSDGSRRMLASILSTNNKRGEIHKGNQIFLSQKFVKLLYHAKRISNTINENHRKYVENHKKEFEELFYYILEFNENYVGAKKNGKLLNSAFQSWQNHSIDELCSSFIGPTGSERKGLFELTSRGSAADFEFLGVKIPRYRDYTPSSLLKDATLIHQSVTGLYETRIDLAKLGEG

SEQ ID NO: 8 - protein, 1121 aa, Streptococcus thermophilus
MSDLVLGLDIGIGSVGVGILNKVTGEIIHKNSRIFPAAQAENNLVRRTNRQGRRLTRRKKHRRVRLNRLFEESGLITDFTKISINLNPYQLRVKGLTDELSNEELFIALKNMVKHRGISYLDDASDDGNSSIGDYAQIVKENSKQLETKTPGQIQLERYQTYGQLRGDFTVEKDGKKHRLINVFPTSAYRSEALRILQTQQEFNPQITDEFINRYLEILTGKRKYYHGPGNEKSRTDYGRYRTSGETLDNIFGILIGKCTFYPDEFRAAKASYTAQEFNLLNDLNNLTVPTETKKLSKEQKNQIINYVKNEKAMGPAKLFKYIAKLLSCDVADIKGYRIDKSGKAEIHTFEAYRKMKTLETLDIEQMDRETLDKLAYVLTLNTEREGIQEALEHEFADGSFSQKQVDELVQFRKANSSIFGKGWHNFSVKLMMELIPELYETSEEQMTILTRLGKQKTTSSSNKTKYIDEKLLTEEIYNPVVAKSVRQAIKIVNAAIKEYGDFDNIVIEMARETNEDDEKKAIQKIQKANKDEKDAAMLKAANQYNGKAELPHSVFHGHKQLATKIRLWHQQGERCLYTGKTISIHDLINNSNQFEVDHILPLSITFDDSLANKVLVYATANQEKGQRTPYQALDSMDDAWSFRELKAFVRESKTLSNKKKEYLLTEEDISKFDVRKKFIERNLVDTRYASRVVLNALQEHFRAHKIDTKVSVVRGQFTSQLRRHWGIEKTRDTYHHHAVDALIIAASSQLNLWKKQKNTLVSYSEDQLLDIETGELISDDEYKESVFKAPYQHFVDTLKSKEFEDSILFSYQVDSKFNRKISDATIYATRQAKVGKDKADETYVLGKIKDIYTQDGYDAFMKIYKKDKSKFLMYRHDPQTFEKVIEPILENYPNKQINEKGKEVPCNPFLKYKEEHGYIRKYSKKGNGPEIKSLKYYDSKLGNHIDITPKDSNNKVVLQSVSPWRADVYFNKTTGKYEILGLKYADLQFEKGTGTYKISQEKYNDIKKKEGVDSDSEFKFTLYKNDLLLVKDTETKEQQLFRFLSRTMPKQKHYVELKPYDKQKFEGGEALIKVLGNVANSGQCKKGLGKSNISIYKVRTDVLGNQHIIKNEGDKPKLDF

SEQ ID NO: 9 - protein, 1367 aa, Artificial Sequence
  Synthetic polypeptide
DKKYSIGLAIGTNSVGWAVITDEYKVPSKKFKVLGNTDRHSIKKNLIGALLFDSGETAEATRLKRTARRRYTRRKNRICYLQEIFSNEMAKVDDSFFHRLEESFLVEEDKKHERHPIFGNIVDEVAYHEKYPTIYHLRKKLVDSTDKADLRLIYLALAHMIKFRGHFLIEGDLNPDNSDVDKLFIQLVQTYNQLFEENPINASGVDAKAILSARLSKSRRLENLIAQLPGEKKNGLFGNLIALSLGLTPNFKSNFDLAEDAKLQLSKDTYDDDLDNLLAQIGDQYADLFLAAKNLSDAILLSDILRVNTEITKAPLSASMIKRYDEHHQDLTLLKALVRQQLPEKYKEIFFDQSKNGYAGYIDGGASQEEFYKFIKPILEKMDGTEELLVKLNREDLLRKQRTFDNGSIPHQIHLGELHAILRRQEDFYPFLKDNREKIEKILTFRIPYYVGPLARGNSRFAWMTRKSEETITPWNFEEVVDKGASAQSFIERMTAFDKNLPNEKVLPKHSLLYEYFTVYNELTKVKYVTEGMRKPAFLSGEQKKAIVDLLFKTNRKVTVKQLKEDYFKKIECFDSVEISGVEDRFNASLGTYHDLLKIIKDKDFLDNEENEDILEDIVLTLTLFEDREMIEERLKTYAHLFDDKVMKQLKRRRYTGWGALSRKLINGIRDKQSGKTILDFLKSDGFANRNFMALIHDDSLTFKEDIQKAQVSGQGDSLHEHIANLAGSPAIKKGILQTVKVVDELVKVMGRHKPENIVIEMARENQTTQKGQKNSRERMKRIEEGIKELGSQILKEHPVENTQLQNEKLYLYYLQNGRDMYVDQELDINRLSDYDVDHIVPQSFLKDDSIDNKVLTRSDKNRGKSDNVPSEEVVKKMKNYWRQLLNAKLITQRKFDNLTKAERGGLSELDKAGFIKRQLVETRAITKHVAQILDSRMNTKYDENDKLIREVKVITLKSKLVSDFRKDFQFYKVREINNYHHAHDAYLNAVVGTALIKKYPKLESEFVYGDYKVYDVRKMIAKSEQEIGKATAKYFFYSNIMNFFKTEITLANGEIRKRPLIETNGETGEIVWDKGRDFATVRKVLSMPQVNIVKKTEVQTGGFSKESILPKRNSDKLIARKKDWDPKKYGGFDSPTVAYSVLVVAKVEKGKSKKLKSVKELLGITIMERSSFEKNPIDFLEAKGYKEVKKDLIIKLPKYSLFELENGRKRMLASAGELQKGNELALPSKYVNFLYLASHYEKLKGSPEDNEQKQLFVEQHKHYLDEIIEQISEFSKRVILADANLDKVLSAYNKHRDKPIREQAENIIHLFTLTNLGAPAAFKYFDTTIDRKRYTSTKEVLDATLIHQSITGLYETRIDLSQLGGD

SEQ ID NO: 10 - protein, 1300 aa, Francisella novicida
MSIYQEFVNKYSLSKTLRFELIPQGKTLENIKARGLILDDEKRAKDYKKAKQIIDKYHQFFIEEILSSVCISEDLLQNYSDVYFKLKKSDDDNLQKDFKSAKDTIKKQISEYIKDSEKFKNLFNQNLIDAKKGQESDLILWLKQSKDNGIELFKANSDITDIDEALEIIKSFKGWTTYFKGFHENRKNVYSSNDIPTSIIYRIVDDNLPKFLENKAKYESLKDKAPEAINYEQIKKDLAEELTFDIDYKTSEVNQRVFSLDEVFEIANFNNYLNQSGITKFNTIIGGKFVNGENTKRKGINEYINLYSQQINDKTLKKYKMSVLFKQILSDTESKSFVIDKLEDDSDVVTTMQSFYEQIAAFKTVEEKSIKETLSLLFDDLKAQKLDLSKIYFKNDKSLTDLSQQVFDDYSVIGTAVLEYITQQIAPKNLDNPSKKEQELIAKKTEKAKYLSLETIKLALEEFNKHRDIDKQCRFEEILANFAAIPMIFDEIAQNKDNLAQISIKYQNQGKKDLLQASAEDDVKAIKDLLDQTNNLLHKLKIFHISQSEDKANILDKDEHFYLVFEECYFELANIVPLYNKIRNYITQKPYSDEKFKLNFENSTLANGWDKNKEPDNTAILFIKDDKYYLGVMNKKNNKIFDDKAIKENKGEGYKKIVYKLLPGANKMLPKVFFSAKSIKFYNPSEDILRIRNHSTHTKNGSPQKGYEKFEFNIEDCRKFIDFYKQSISKHPEWKDFGFRFSDTQRYNSIDEFYREVENQGYKLTFENISESYIDSVVNQGKLYLFQIYNKDFSAYSKGRPNLHTLYWKALFDERNLQDVVYKLNGEAELFYRKQSIPKKITHPAKEAIANKNKDNPKKESVFEYDLIKDKRFTEDKFFFHCPITINFKSSGANKFNDEINLLLKEKANDVHILSIDRGERHLAYYTLVDGKGNIIKQDTFNIIGNDRMKTNYHDKLAAIEKDRDSARKDWKKINNIKEMKEGYLSQVVHEIAKLVIEYNAIVVFEDLNFGFKRGRFKVEKQVYQKLEKMLIEKLNYLVFKDNEFDKTGGVLRAYQLTAPFETFKKMGKQTGIIYYVPAGFTSKICPVTGFVNQLYPKYESVSKSQEFFSKFDKICYNLDKGYFEFSFDYKNFGDKAAKGKWTIASFGSRLINFRNSDKNHNWDTREVYPTKELEKLLKDYSIEYGHGECIKAAICGESDKKFFAKLTSVLNTILQMRNSKTGTELDYLISPVADVNGNFFDSRQAPKNMPQDADANGAYHIGLKGLMLLGRIKNNQEGKKLNLVIKNEEYFEFVQNRNN

SEQ ID NO: 11 - protein, 1368 aa, Streptococcus pyogenes [sequence omitted]

SEQ ID NO: 12 - protein, 1372 aa, Streptococcus gallolyticus
MTKKNYSIGLDIGTNSVGWAVITDDYKVPAKKMKVLGNTDKKYIKKNLLGALLFDSGETAEATRLKRTARRRYTRRKNRLRYLQEIFANEIAKVDESFFQRLDESFLTDDDKTFDSHPIFGNKAEEDAYHQKFPTIYHLRKHLADSSEKADLRLVYLALAHMIKFRGHFLIEGELNAENTDVQKIFADFVGVYNRTFDDSHLSEITVDVASILTEKISKSRRLENLIKYYPTEKKNTLFGNLIALALGLQPNFKTNFKLSEDAKLQFSKDTYEEDLEELLGKIGDDYADLFTSAKNLYDAILLSGILTVDDNSTKAPLSASMIKRYVEHHEDLEKLKEFIKANKSELYHDIFKDKNKNGYAGYIENGVKQDEFYKYLKNILSKIKIDGSDYFLDKIEREDFLRKQRTFDNGSIPHQIHLQEMHAILRRQGDYYPFLKEKQDRIEKILTFRIPYYVGPLVRKDSRFAWAEYRSDEKITPWNFDKVIDKEKSAEKFITRMTLNDLYLPEEKVLPKHSHVYETYAVYNELTKIKYVNEQGKESFFDSNMKQEIFDHVFKENRKVTKEKLLNYLNKEFPEYRIKDLIGLDKENKSFNASLGTYHDLKKILDKAFLDDKVNEEVIEDIIKTLTLFEDKDMIHERLQKYSDIFTANQLKKLERRHYTGWGRLSYKLINGIRNKENNKTILDYLIDDGSANRNFMQLINDDTLPFKQIIQKSQVVGDVDDIEAVVHDLPGSPAIKKGILQSVKIVDELVKVMGGNPDNIVIEMARENQTTNRGRSQSQQRLKKLQNSLKELGSNILNEEKPSYIEDKVENSHLQNDQLFLYYIQNGKDMYTGDELDIDHLSDYDIDHIIPQAFIKDDSIDNRVLTSSAKNRGKSDDVPSLDIVRARKAEWVRLYKSGLISKRKFDNLTKAERGGLTEADKAGFIKRQLVETRQITKHVAQILDARFNTEHDENDKVIRDVKVITLKSNLVSQFRKDFEFYKVREINDYHHAHDAYLNAVVGTALLKKYPKLASEFVYGEYKKYDIRKFITNSSDKATAKYFFYSNLMNFFKTKVKYADGTVFERPIIETNADGEIAWNKQIDFEKVRKVLSYPQVNIVKKVETQTGGFSKESILPKGDSDKLIPRKTKKVYWDTKKYGGFDSPTVAYSVFVVADVEKGKAKKLKTVKELVGISIMERSFFEENPVEFLENKGYHNIREDKLIKLPKYSLFEFEGGRRRLLASASELQKGNEMVLPGYLVELLYHAHRADNFNSTEYLNYVSEHKKEFEKVLSCVEDFANLYVDVEKNLSKIRAVADSMDNFSIEEISNSFINLLTLTALGAPADFNFLGEKIPRKRYTSTKECLNATLIHQSITGLYETRIDLSKLGEE

SEQ ID NO: 13 - protein, 1370 aa, Streptococcus mitis
MKKGYSIGLDIGTNSVGFAVITDDYKVPSKKMKVLGNTDKRFIKKNLIGALLFDEGTTAEARRLKRTARRRYTRRKNRLRYLQEIFSEEMSKVDSSFFHRLDDSFLIPEDKRESKYPIFATLTEEKEYHKQFPTIYHLRKQLADSKEKTDLRLIYLALAHMIKYRGHFLYEEAFDIKNNDIQKIFNEFISIYDNTFEGSSLSGQNAQVEAIFTDKISKSAKRERVLKLFPDEKSTGLFSEFLKLIVGNQADFKKHFDLEDKAPLQFSKDTYDEDLENLLGQIGDDFTDLFVSAKKLYDAILLSGILTVTDPSTKAPLSASMIERYENHQNDLAALKQFIKNNLPEKYDEVFSDQSKDGYAGYIDGKTTQETFYKYIKNLLSKFEGTDYFLDKIEREDFLRKQRTFDNGSIPHQIHLQEMNAILRRQGEYYPFLKDNKEKIEKILTFRIPYYVGPLARGNRDFAWLTRNSDEAIRPWNFEEIVDKASSAEDFINKMTNYDLYLPEEKVLPKHSLLYETFAVYNELTKVKFIAEGLRDYQFLDSGQKKQIVNQLFKENRKVTEKDIIHYLHNVDGYDGIELKGIEKQFNASLSTYHDLLKIIKDKEFMDDAKNEAILENIVHTLTIFEDREMIKQRLAQYDSLFDEKVIKALTRRHYTGWGKLSAKLINGICDKQTGNTILDYLIDDGKINRNFMQLINDDGLSFKEIIQKAQVIGKTDDVKQVVQELSGSPAIKKGILQSIKIVDELVKVMGHAPESIVIEMARENQTTARGKKNSQQRYKRIEDSLKILASGLDSNILKENPTDNNQLQNDRLFLYYLQNGKDMYTGEALDINQLSSYDIDHIIPQAFIKDDSLDNRVLTSSKDNRGKSDNVPSIEVVQKRKAFWQQLLDSKLISERKFNNLTKAERGGLDERDKVGFIKRQLVETRQITKHVAQILDARYNTEVNEKDKKNRTVKIITLKSNLVSNFRKEFRLYKVREINDYHHAHDAYLNAVVAKAILKKYPKLEPEFVYGEYQKYDLKRYISRSKDPKEVEKATEKYFFYSNLLNFFKEEVHYADGTIVKRENIEYSKDTGEIAWNKEKDFAIIKKVLSLPQVNIVKKREVQTGGFSKESILPKGNSDKLIPRKTKDILLDTTKYGGFDSPVIAYSILLIADIEKGKAKKLKTVKTLVGITIMEKAAFEENPITFLENKGYHNVRKENILCLPKYSLFELENGRRRLLASAKELQKGNEIVLPVYLTTLLYHSKNVHKLDEPGHLEYIQKHRNEFKDLLNLVSEFSQKYVLADANLEKIKSLYADNEQADIEILANSFINLLTFTALGAPAAFKFFGKDIDRKRYTTVSEILNATLIHQSITGLYETWIDLSKLGED

SEQ ID NO: 14 - protein, 1056 aa, Staphylococcus Aureus
GSHMKRNYILGLDIGITSVGYGIIDYETRDVIDAGVRLFKEANVENNEGRRSKRGARRLKRRRRHRIQRVKKLLFDYNLLTDHSELSGINPYEARVKGLSQKLSEEEFSAALLHLAKRRGVHNVNEVEEDTGNELSTKEQISRNSKALEEKYVAELQLERLKKDGEVRGSINRFKTSDYVKEAKQLLKVQKAYHQLDQSFIDTYIDLLETRRTYYEGPGEGSPFGWKDIKEWYEMLMGHCTYFPEELRSVKYAYNADLYNALNDLNNLVITRDENEKLEYYEKFQIIENVFKQKKKPTLKQIAKEILVNEEDIKGYRVTSTGKPEFTNLKVYHDIKDITARKEIIENAELLDQIAKILTIYQSSEDIQEELTNLNSELTQEEIEQISNLKGYTGTHNLSLKAINLILDELWHTNDNQIAIFNRLKLVPKKVDLSQQKEIPTTLVDDFILSPVVKRSFIQSIKVINAIIKKYGLPNDIIIELAREKNSKDAQKMINEMQKRNRQTNERIEEIIRTTGKENAKYLIEKIKLHDMQEGKCLYSLEAIPLEDLLNNPFNYEVDHIIPRSVSFDNSFNNKVLVKQEEASKKGNRTPFQYLSSSDSKISYETFKKHILNLAKGKGRISKTKKEYLLEERDINRFSVQKDFINRNLVDTRYATRGLMNLLRSYFRVNNLDVKVKSINGGFTSFLRRKWKFKKERNKGYKHHAEDALIIANADFIFKEWKKLDKAKKVMENQMFEEKQAESMPEIETEQEYKEIFITPHQIKHIKDFKDYKYSHRVDKKPNRELINDTLYSTRKDDKGNTLIVNNLNGLYDKDNDKLKKLINKSPEKLLMYHHDPQTYQKLKLIMEQYGDEKNPLYKYYEETGNYLTKYSKKDNGPVIKKIKYYGNKLNAHLDITDDYPNSRNKVVKLSLKPYRFDVYLDNGVYKFVTVKNLDVIKKENYYEVNSKAYEEAKKLKKISNQAEFIASFYNNDLIKINGELYRVIGVNNDLLNRIEVNMIDITYREYLENMNDKRPPRIIKTIASKTQSIKKYSTDILGNLYEVKSKKHPQIIKKG

SEQ ID NO: 15 - protein, 1052 aa, Streptococcus pyogenes
LSASMIKRYDEHHQDLTLLKALVRQQLPEKYKEIFFDQSKNGYAGYIDGGASQEEFYKFIKPILEKMDGTEELLAKLNREDLLRKQRTFDNGSIPHQIHLGELHAILRRQEDFYPFLKDNREKIEKILTFRIPYYVGPLARGNSRFAWMTRKSEETITPWNFEEVVDKGASAQSFIERMTNFDKNLPNEKVLPKHSLLYEYFTVYNELTKVKYVTEGMRKPAFLSGEQKKAIVDLLFKTNRKVTVKQLKEDYFKKIECFDSVEISGVEDRFNASLGTYHDLLKIIKDKDFLDNEENEDILEDIVLTLTLFEDREMIEERLKTYAHLFDDKVMKQLKRRRYTGWGRLSRKLINGIRDKQSGKTILDFLKSDGFANRNFMQLIHDDSLTFKEDLQKAQVSGQGDSLHEHIANLAGSPAIKKGILQTVKVVDELVKVMGRHKPENIVIEMARENQTTQKGQKNSRERMKRIEEGIKELGSDILKEYPVENTQLQNEKLYLYYLQNGRDMYVDQELDINRLSDYDVDHIVPQSFLKDDSIDNKVLTRSDKNRGKSDNVPSEEVVKKMKNYWKQLLNAKLITQRKFDNLTKAERGGLSELDKAGFIKRQLVETRQITKHVAQILDSRMNTKYDENDKLIREVRVITLKSKLVSDFRKDFQFYKVREINNYHHAHDAYLNAVVGTALIKKYPKLESEFVYGDYKVYDIRKMIAKSEQEIGKATAKYFFYSNIMNFFKTEITLANGEIRKRPLIETNGETGEIVWDKGRDFATVRKVLSMPQVNIVKKTEVQTGGFSKESILPKRNSDKLIARKKDWDPKKYGGFDSPTVAYSVLVVAKVEKGKSKKLKSVKELVGITIMERSSFEKDPVDFLEAKGYKEVRKDLIIKLPKYSLFELENGRKRMLASAGELQKGNELALPSKYVNFLYLASHYEKLKGSPEDNEQKQLFVEQHKHYLDEIIEQISEFSKRVILADANLDKVLSAYNKHRDKPIREQAENIIHLFTLTNLGAPAAFKCFDTTIGRNRYKSIKEVLDATLIHQSITGLYETRIDLSQLGGD

SEQ ID NO: 16 - protein, 1368 aa, Streptococcus pyogenes [sequence omitted]

SEQ ID NO: 17 - protein, 1368 aa, Streptococcus pyogenes
MDKKYSIGLDIGTNSVGWAVITDDYKVPSKKLKGLGNTDRHGIKKNLIGALLFDSGETAEATRLKRTARRRYTRRKNRICYLQEIFSNEMAKVDDSFFHRLEESFLVEEDKKHERHPIFGNIVDEVAYHEKYPTIYHLRKKLADSTDKVDLRLIYLALAHMIKFRGHFLIEGDLNPDNSDVDKLFIQLVQTYNQLFEENPINASRVDAKAILSARLSKSRRLENLIAQLPGEKKNGLFGNLIALSLGLTPNFKSNFDLAEDAKLQLSKDTYDDDLDNLLAQIGDQYADLFLAAKNLSDATLLSDILRVNSEITKAPLSASMIKRYDEHHQDLTLLKALVRQQLPEKYKEIFFDQSKNGYAGYIDGGASQEEFYKFIKPILEKMDGTEELLAKLNREDLLRKQRTFDNGSIPYQIHLGELHAILRRQEDFYPFLKDNREKIEKILTFRIPYYVGPLARGNSRFAWMTRKSEETITPWNFEEVVDKGASAQSFIERMTNFDKNLPNEKVLPKHSLLYEYFTVYNELTKVKYVTEGMRKPAFLSGEQKKAIVDLLFKTNRKVTVKQLKEDYFKKIECFDSVEISGVEDRFNASLGTYHDLLKIIKDKDFLDNEENEDILEDIVLTLTLFEDREMIEERLKTYAHLFDDKVMKQLKRRRYTGWGRLSRKLINGIRDKQSGKTILDFLKSDGFANRNFMQLIHDDSLTFKEDIQKAQVSGQGDSLHEHIANLAGSPAIKKGILQTVKVVDELVKVMGRHKPENIVIEMARENQTTQKGQKNSRERMKRIEEGIKELGSDILKEYPVENTQLQNEKLYLYYLQNGRDMYVDQELDINRLSDYDVDHIVPQSFLKDDSIDNKVLTRSDKNRGKSDNVPSEEVVKKMKNYWRQLLNAKLITQRKFDNLTKAERGGLSELDKVGFIKRQLVETRQITKHVAQILDSRMNTKYDENDKLIREVRVITLKSKLVSDFRKDFQFYKVREINNYHHAHDAYLNAVVGTALIKKYPKLESEFVYGDYKVYDVRKMIAKSEQEIGKATAKYFFYSNIMNFFKTEITLANGEIRKRPLIETNGETGEIVWDKGRDFATVRKVLSMPQVNIVKKTEVQTGGFSKESILPKRNSDKLIARKKDWDPKKYGGFDSPTVAYSVLVVAKVEKGKSKKLKSVKELLGITIMERSSFEKDPIDFLEAKGYKEVRKDLIIKLPKYSLFELENGRKRMLASAGELQKGNELALPSKYVNFLYLASHYEKLKGSPEDNEQKQLFVEQHKHYLDEIIEQISEFSKRVILADANLDKVLSAYNKHRDKPIREQAENIIHLFTLTNLGAPAAFKYFDTTIDRKRYTSTKEVLDATLIHQSITGLYETRIDLSQLGGD

SEQ ID NO: 18 - protein, 1368 aa, Streptococcus pyogenes
MDKKYSIGLDIGTNSVGWAVITDDYKVPSKKFKVLGNTDRHSIKKNLIGALLFDSGETAEATRLKRTARRRYTRRKNRICYLQEIFSNEMAKVDDSFFHRLEESFLVEEDKKHERHPIFGNIVDEVAYHEKYPTIYHLRKKLVDSTDKADLRLIYLALAHMIKFRGHFLIEGDLNPDNSDVDKLFIQLVQTYNQLFEENPINASGVDAKAILSARLSKSRRLENLIAQLPGEKKNGLFGNLIALSLGLTPNFKSNFDLAEDAKLQLSKDTYDDDLDNLLAQIGDQYADLFLAAKNLSDAILLSDILRLNSEITKAPLSASMIKRYDEHHQDLTLLKALVRQQLPEKYKEIFFDQSKNGYAGYIDGGASQEEFYKFIKPILEKMDGTEELLAKLNREDLLRKQRTFDNGSIPHQIHLGELHAILRRQEDFYPFLKDNREKIEKILTFRIPYYVGPLARGNSRFAWMTRKSEETITPWNFEEVVDKGASAQSFIERMTNFDKNLPNEKVLPKHSLLYEYFTVYNELTKVKYVTEGMRKPAFLSGEQKKAIVDLLFKTNRKVTVKQLKEDYFKKIECFDSVEISGVEDRFNASLGTYHDLLKIIKDKDFLDNEENEDILEDIVLTLTLFEDREMIEERLKTYAHLFDDKVMKQLKRRRYTGWGRLSRKLINGIRDKQSGKTILDFLKSDGFANRNFMQLIHDDSLTFKEDIQKAQVSGQGDSLHEHIANLAGSPAIKKGILQTVKVVDELVKVMGRHKPENIVIEMARENQTTQKGQKNSRERMKRIEEGIKELGSQILKEHPVENTQLQNEKLYLYYLQNGRDMYVDQELDINRLSDYDVDHIVPQSFIKDDSIDNKVLTRSDKNRGKSNNVPSEEVVKKMKNYWRQLLNAKLITQRKFDNLTKAERGGLSELDKAGFIKRQLVETRQITKHVAQILDSRMNTKYDENDKLIREVKVITLKSKLVSDFRKDFQFYKVREINNYHHAHDAYLNAVVGTALIKKYPKLESEFVYGDYKVYDVRKMIAKSEQEIGKATAKYFFYSNIMNFFKTEITLANGEIRKRPLIETNGETGEIVWDKGRDFATVRKVLSMPQVNIVKKTEVQTGGFSKESILPKRNSDKLIARKKDWDPKKYGGFDSPTVAYSVLVVAKVEKGKSKKLKSVKELLGITIMERSSFEKNPIDFLEAKGYKEVRKDLIVKLPKYSLFELENGRKRMLASAGELQKGNELALPSKYVNFLYLASHYEKLKGSPEDNEQKQLFVEQHKHYLDEIIEQISEFSKRVILADANLDKVLSAYNKHRDKPIREQAENIIHLFTLTNLGAPAAFKYFDTTIDRKRYTSTKEVLDATFIHQSITGLYETRIDLSQLGGD

SEQ ID NO: 19 - protein, 1368 aa, Streptococcus pyogenes
MDKKYSIGLDIGTNSVGWAVITDDYKVPSKKFKVLGNTDRHSIKKNLIGALLFDSGETAEATRLKRTARRRYTRRKNRICYLQEIFSNEMAKVDDSFFHRLEESFLVEEDKKHERHPIFGNIVDEVAYHEKYPTIYHLRKKLVDSTDKADLRLIYLALAHMIKFRGHFLIEGDLNPDNSDVDKLFIQLVQTYNQLFEENPINASGVDAKAILSARLSKSRRLENLIAQLPGEKKNGLFGNLIALSLGLTPNFKSNFDLAEDAKLQLSKDTYDDDLDNLLAQIGDQYADLFLAAKNLSDAILLSDILRVNTEITKAPLSASMIKRYDEHHQDLTLLKALVRQQLPEKYKEIFFDQSKNGYAGYIDGGASQEEFYKFIKPILEKMDGTEELLVKLNREDLLRKQRTFDNGSIPHQIHLGELHAILRRQEDFYPFLKDNREKIEKILTFRIPYYVGPLARGNSRFAWMTRKSEETITPWNFEEVVDKGASAQSFIERMTNFDKNLPNEKVLPKHSLLYEYFTVYNELTKVKYVTEGMRKPAFLSGEQKKAIVDLLFKTNRKVTVKQLKEDYFKKIECFDSVEISGVEDRFNASLGTYHDLLKIIKDKDFLDNEENEDILEDIVLTLTLFEDREMIEERLKTYAHLFDDKVMKQLKRRRYTGWGRLSRKLINGIRDKQSGKTILDFLKSDGFANRNFMQLIHDDSLTFKEDIQKAQVSGQGDSLHEHIANLAGSPAIKKGILQTVKVVDELVKVMGRHKPENIVIEMARENQTTQKGQKNSRERMKRIEEGIKELGSQILKEHPVENTQLQNEKLYLYYLQNGRDMYVDQELDINRLSDYDVDHIVPQSFLKDDSIDNKVLTRSDKNRGKSDNVPSEEVVKKMKNYWRQLLNAKLITQRKFDNLTKAERGGLSELDKAGFIKRQLVETRQITKHVAQILDSRMNTKYDENDKLIREVKVITLKSKLVSDFRKDFQFYKVREINNYHHAHDAYLNAVVGTALIKKYPKLESEFVYGDYKVYDVRKMIAKSEQEIGKATAKYFFYSNIMNFFKTEITLANGEIRKRPLIETNGETGEIVWDKGRDFATVRKVLSMPQVNIVKKTEVQTGGFSKESILPKRNSDKLIARKKDWDPKKYGGFDSPTVAYSVLVVAKVEKGKSKKLKSVKELLGITIMERSSFEKNPIDFLEAKGYKEVKKDLIIKLPKYSLFELENGRKRMLASAGELQKGNELALPSKYVNFLYLASHYEKLKGSPEDNEQKQLFVEQHKHYLDEIIEQISEFSKRVILADANLDKVLSAYNKHRDKPIREQAENIIHLFTLTNLGAPAAFKYFDTTIDRKRYTSTKEVLDATLIHQSITGLYETRIDLSQLGGD

SEQ ID NO: 20 - protein, 1368 aa, Streptococcus pyogenes
MDKKYSIGLDIGTNSVGWAVITDDYKVPSKKFKVLGNTDRHSIKKNLIGALLFDSGEIAEATRLKRTARRRYTRRKNRICYLQEIFSNEMAKVDDSFFHRLEESFLVEEDKKHERHPIFGNIVDEVAYHEKYPTIYHLRKKLVDSTDKADLRLIYLALAHMIKFRGHFLIEGDLNPDNSDVDKLFIQLVQTYNQLFEENPINASGVDAKAILSARLSKSRRLENLIAQLPGEKKNGLFGNLIALSLGLTPNFKSNFDLAEDAKLQLSKDTYDDDLDNLLAQIGDQYADLFLAAKNLSDAILLSDILRLNSEITKAPLSASMIKRYDEHHQDLTLLKALVRQQLPEKYKEIFFDQSKNGYAGYIDGGASQEEFYKFIKPILEKMDGTEELLAKLNREDLLRKQRTFDNGSIPHQIHLGELHAILRRQEDFYPFLKDNREKIEKILTFRIPYYVGPLARGNSRFAWMTRKSEETITPWNFEEVVDKGASAQSFIERMTNFDKNLPNEKVLPKHSLLYEYFTVYNELTKVKYVTEGMRKPAFLSGEQKKAIVDLLFKTNRKVTVKQLKEDYFKKIECFDSVEISGVEDRFNASLGTYHDLLKIIKDKDFLDNEENEDILEDIVLTLTLFEDREMIEERLKTYAHLFDDKVMKQLKRRRYTVWGRLSRKLINGIRDKQSGKTILDFLKSDGFANRNFMQLIHDDSLTFKEDIQKAQVSGQGDSLHEHIANLAGSPAIKKGILQTVKVVDELVKVMGRHKPENIVIEMARENQTTQKGQKNSRERMKRIEEGIKELGSQILKEHPVENTQLQNEKLYLYYLQNGRDMYVDQELDINRLSDYDVDHIVPQSFIKDDSIDNKVLTRSDKNRGKSDNVPSEEVVKKMKNYWRQLLNAKLITQRKFDNLTKAERGGLSELDKAGFIKRQLVETRQITKHVAQILDSRMNTKYDENDKLIREVKVITLKSKLVSDFRKDFQFYKVREINNYHHAHDAYLNAVVGTALIKKYPKLESEFVYGDYKVYDVRKMLAKSEQEIGKATAKYFFYSNIMNFFKTEITLANGEIRKRPLIETNGETGEIVWDKGRDFATVRKVLSMPQVNIVKKTEVQTGGFSKESILPKRNSDKLIARKKDWDPKKYGGFDSPTVAYSVLVVAKVEKGKSKKLKSVKELLGITIMERSSFEKNPIDFLEAKGYKEVRKDLIIKLPKYSLFELENGRKRMLASAGELQKGNELALPSKYVNFLYLASHYEKLKGSPEDNEQKQLFVEQHKHYLDEIIEQISEFSKRVILADANLDKVLSAYNKHRDKPIREQAENIIHLFTLTNLGAPTAFKYFDTTIDRKRYTSTKEVLDATFIHQSITGLYETRIDLSQLGGD

SEQ ID NO: 21 - protein, 1368 aa, Streptococcus pyogenes
MDKKYSIGLDIGTNSVGWAVITDDYKVPSKKFKVLGNTDRHSIKKNLIGALLFDSGETAEATRLKRTARRRYTRRKNRICYLQEIFSNEIAKVDDSFFHRLEESFLVEEDKKHERHPIFGNIVDEVAYHEKYPTIYHLRKKLADSTDKADLRLIYLALAHMIKFRGHFLIEGDLNPDNSDVDKLFIQLVQTYNQLFEENPINASRVDAKAILSARLSKSRRLENLIAQLPGEKRNGLFGNLIALSLGLTPNFKSNFDLAEDAKLQLSKDTYDDDLDNLLAQIGDQYADLFLAAKNLSDAILLSDILRVNTEITKAPLSASMIKRYDEHHQDLTLLKALVRQQLPEKYKEIFFDQSKNGYAGYIDGGASQEEFYKFIKPILEKMDGTEELLAKLNREDLLRKQRTFDNGSIPHQIHLGELHAILRRQEDFYPFLKDNREKIEKILTFRIPYYVGPLARGNSRFAWMTRKSEETITPWNFEEVVDKGASAQSFIERMTNFDKNLPNEKVLPKHSLLYEYFTVYNELTKVKYVTEGMRKPAFLSGEQKKAIVDLLFKTNRKVTVKQLKEDYFKKIECFDSVEISGVEDRFNASLGTYHDLLKIIKDKDFLDNEENEDILEDIVLTLTLFEDREMIEERLKTYAHLFDDKVMKQLKRRRYTGWGRLSRKLINGIRDKQSGKTILDFLKSDGFANRNFMQLIHDDSLTFKEDLQKAQVSGQGDSLHEHIANLAGSPAIKKGILQTVKVVDELVKVMGRHKPENIVIEMARENQTTQKGQKNSRERMKRIEEGIKELGSDILKEYPVETTQLQNEKLYLYYLQNGRDMYVDQELDINRLSDYDVDHIVPQSFLKDDSIDNKVLTRSDKNRGKSDNVPSEEVVKKMKNYWKQLLNAKLITQRKFDNLTKAERGGLSELDKAGFIKRQLVETRQITKHVAQILDSRMNTKYDENDKLIREVRVITLKSKLVSDFRKDFQFYKVREINNYHHAHDAYLNAVVGTALIKKYPKLESEFVYGDYKVYDIRKMIAKSEQEIGKATAKYFFYSNIMNFFKTEITLANGEIRKRPLIETNGETGEIVWDKGRDFATVRKVLSMPQVNIVKKTEVQTGGFSKESILPKRNSDKLIARKKDWDPKKYGGFDSPTVAYSVLVVAKVEKGKSKKLKSVKELVGITIMERSSFEKDPVDFLEAKGYKEVRKDLIIKLPKYSLFELENGRKRMLASAGELQKGNELALPSKYVNFLYLASHYEKLKGSPEDNEQKQLFVEQHKHYLDEIIEQISEFSKRVILADANLDKVLSAYNKHRDKPIREQAENIIHLFTLTNLGAPAAFKCFDTTIGRNRYKSIKEVLDATLIHQSITGLYETRIDLSQLGGD

SEQ ID NO: 22 - protein, 1367 aa, Streptococcus pyogenes
MDKKYSIGLDIGTNSVGWAVITDDYKVPSKKFKVLGNTDRHSIKKNLIGALLFGSGETAEATRLKRTARRRYTRRKNRICYLQEIFSNEMAKVDDSFFHRLEESFLVEEDKKHERHPIFGNIVDEVAYHEKYPTIYHLRKKLADSTDKADLRLIYLALAHMIKFRGHFLIEGDLNPDNSDVDKLFIQLVQIYNQLFEENPINASRVDAKAILSARLSKSRRLENLIAQLPGEKRNGLFGNLIALSLGLTPNFKSNFDLAEDAKLQLSKDTYDDDLDNLLAQIGDQYADLFLAAKNLSDAILLSDILRVNSEITKAPLSASMIKRYDEHHQDLTLLKALVRQQLPEKYKEIFFDQSKNGYAGYIDGGASQEEFYKFIKPILEKMDGTEELLVKLNREDLLRKQRTFDNGSIPHQIHLGELHAILRRQEDFYPFLKDNREKIEKILTFRIPYYVGPLARGNSRFAWMTRKSEETITPWNFEEVVDKGASAQSFIERMTNFDKNLPNEKVLPKHSLLYEYFTVYNELTKVKYVTEGMRKPAFLSGEQKKAIVDLLFKTNRKVTVKQLKEDYFKKIECFDSVEISGVEDRFNASLGAYHDLLKIIKDKDFLDNEENEDILEDIVLTLTLFEDRGMIEERLKTYAHLFDDKVMKQLKRRRYTGWGRLSRKLINGIRDKQSGKTILDFLKSDGFANRNFMQLIHDDSLTFKEDIQKAQVSGQGHSLHEQIANLAGSPAIKKGILQTVKIVDELVKVMGHKPENIVIEMARENQTTQKGQKNSRERMKRIEEGIKELGSQILKEHPVENTQLQNEKLYLYYLQNGRDMYVDQELDINRLSDYDVDHIVPQSFIKDDSIDNKVLTRSDKNRGKSDNVPSEEVVKKMKNYWRQLLNAKLITQRKFDNLTKAERGGLSELDKAGFIKRQLVETRQITKHVAQILDSRMNTKYDENDKLIREVKVITLKSKLVSDFRKDFQFYKVREINNYHHAHDAYLNAVVGTALIKKYPKLESEFVYGDYKVYDVRKMIAKSEQEIGKATAKYFFYSNIMNFFKTEITLANGEIRKRPLIETNGETGEIVWDKGRDFATVRKVLSMPQVNIVKKTEVQTGGFSKESILPKRNSDKLIARKKDWDPKKYGGFDSPTVAYSVLVVAKVEKGKSKKLKSVKELLGITIMERSSFEKNPIDFLEAKGYKEVKKDLIIKLPKYSLFELENGRKRMLASAGELQKGNELALPSKYVNFLYLASHYEKLKGSPEDNEQKQLFVEQHKHYLDEIIEQISEFSKRVILADANLDKVLSAYNKHRDKPIREQAENIIHLFTLTNLGAPAAFKYFDTTIDRKRYTSTKEVLDATLIHQSITGLYETRIDLSQLGGD

SEQ ID NO: 23 - protein, 1368 aa, Streptococcus pyogenes
MDKKYSIGLDIGTNSVGWAVITDDYKVPSKKFKVLGNTDRHSIKKNLIGALLFDSGETAEATRLKRTARRRYTRRKNRICYLQEIFSNEMAKVDDSFFHRLEESFLVEEDKKHERHPIFGNIVDEVAYHEKYPTIYHLRKKLVDSTDKADLRLIYLALAHMIKFRGHFLIEGDLNPDNSDVDKLFIQLVQTYNQLFEENPINASGVDAKAILSARLSKSRRLENLIAQLPGEKKNGLFGNLIALSLGLTPNFKSNFDLAEDAKLQLSKDTYDDDLDNLLAQIGDQYADLFLAAKNLSDAILLSDILRLNSEITKAPLSASMIKRYDEHHQDLTLLKALVRQQLPEKYKEIFFDQSKNGYAGYIDGGASQEEFYKFIKPILEKMDGTEELLAKLNREDLLRKQRTFDNGSIPHQIHLGELHAILRRQEDFYPFLKDNREKIEKILTFRIPYYVGPLARGNSRFAWMTRKSEETITPWNFEEVVDKGASAQSFIERMTNFDKNLPNEKVLPKHSLLYEYFTVYNELTKVKYVTEGMRKPAFLSGEQKKAIVDLLFKTNRKVTVKQLKEDYFKKIECFDSVEISGVEDRFNASLGTYHDLLKIIKDKDFLDNEENEDILEDIVLTLTLFEDREMIEERLKTYAHLFDDKVMKQLKRRRYTGWGRLSRKLINGIRDKQSGKTILDFLKSDGFANRNFMQLIHDDSLTFKEDIQKAQVSGQGDSLHEHIANLAGSPAIKKGILQTVKVVDELVKVMGRHKPENIVIEMARENQTTQKGQKNSRERMKRIEEGIKELGSQILKEHPVENTQLQNEKLYLYYLQNGRDMYVDQELDINRLSDYDVDHIVPQSFIKDDSIDNKVLTRSDKNRGKSDNVPSEEVVKKMKNYWRQLLNAKLITQRKFDNLTKAERGGLSELDKAGFIKRQLVETRQITKHVAQILDSRMNTKYDENDKLIREVKVITLKSKLVSDFRKDFQFYKVREINNYHHAHDAYLNAVVGTALIKKYPKLESEFVYGDYKVYDVRKMIAKSEQEIGKATAKYFFYSNIMNFFKTEITLANGEIRKRPLIETNGETGEIVWDKGRDFATVRKVLSMPQVNIVKKTEVQTGGFSKESILPKRNSDKLIARKKDWDPKKYGGFDSPTVAYSVLVVAKVEKGKSKKLKSVKELLGLTIMERSSFEKNPIDFLEAKGYKEVKKDLIIKLPKYSLFELENGRKRMLASAGELQKGNELALPSKYVNFLYLASHYEKLKGSPEDNEQKQLFVEQHKHYLDEIIEQISEFSKRVILADANLDKVLSAYNKHRDKPIREQAENIIHLFTLTNLGAPAAFKYFDTTIDRKRYTSTKEVLDATLIHQSITGLYETRIDLSQLGGD

SEQ ID NO: 24 - protein, 1367 aa, Streptococcus pyogenes
MDKKYSIGLDIGTNSVGWAVITDDYKVPSKKLKVLGNTDRHGIKKNLIGALLFDSGETAEATRLKRTARRRYTRRKNRICYLQEIFSNEMAKVDDSFFHRLEESFLVEEDKKHERHPIFGNIVDEVAYHEKYPTIYHLRKKLADSTDKVDLRLIYLALAHMIKFRGHFLIEGDLNPDNSDVDKLFIQLVQTYNQLFEENPINASRVDAKAILSARLSKSRRLENLIAQLPGEKKNGLFGNLIALSLGLTPNFKSNFDLAEDAKLQLSKDTYDDDLDNLLAQIGDQYADLFLAAKNLSDAILLSDILRVNSEITKAPLSASMIKRYDEHHQDLTLLKALVRQQLPEKYKEIFFDQSKNGYAGYIDGGASQEEFYKFIKPILEKMDGTEELLAKLNREDLLRKQRTFDNGSIPYQIHLGELHAILRRQEDFYPFLKDNREKIEKILTFRIPYYVGPLARGNSRFAWMTRKSEETITPWNFEEVVDKGASAQSFIERMTNFDKNLPNEKVLPKHSLLYEYFTVYNELTKVKYVTEGMRKPAFLSGEQKKAIVDLLFKTNRKVTVKQLKEDYFKKIECFDSVEISGVEDRFNTSLGTYHDLLKIIKDKDFLDNEENEDILEDIVLTLTLFEDKEMIEERLKKYANLFDDKVMKQLKRRHYTGWGRLSRKLINGIRDKQSGKTILDFLKSDGFANRNFMQLINDDSLTFKEAIQKAQVSGQGHSLHEQIANLAGSPAIKKGILQTVKIVDELVKVMGHKPENIVIEMARENQTTQKGQKNSRERMKRIEEGIKELGSQILKEHPVENTQLQNEKLYLYYLQNGRDMYVDQELDINRLSDYDVDHIVPQSFLKDDSIDNKVLTRSDKNRGKSDNVPSEEVVKKMKNYWRQLLNAKLITQRKFDNLTKAERGGLSELDKAGFIKRQLVETRQITKHVAQILDSRMNTKYDENDKLIREVKVITLKSKLVSDFRKDFQFYKVREINNYHHAHDAYLNAVVGTALIKKYPKLESEFVYGDYKVYDVRKMIAKSEQEIGKATAKYFFYSNIMNFFKTEITLANGEIRKRPLIETNGETGEIVWDKGRDFATVRKVLSMPQVNIVKKTEVQTGGFSKESILPKRNSDKLIARKKDWDPKKYGGFDSPTVAYSVLVVAKVEKGKSKKLKSVKELLGITIMERSSFEKNPIDFLEAKGYKEVRKDLIIKLPKYSLFELENGRKRMLASAGELQKGNELALPSKYVNFLYLASHYEKLKGSPEDNEQKQLFVEQHKHYLDEIIEQISEFSKRVILADANLDKVLSAYNKHRDKPIREQAKNIIHLFTLTNLGAPAAFKYFDTTIERNRYKSIKEVLDATLIHQSITGLYETRIDLSQLGGD

SEQ ID NO: 25 - protein, 1367 aa, Streptococcus pyogenes
MDKKYSIGLDIGTNSVGWAVITDDYKVPSKKLKVLGNTDRHGIKKNLIGALLFDSGETAEATRLKRTARRRYTRRKNRICYLQEIFSNEMAKVDDSFFHRLEESFLVEEDKKHERHPIFGNIVDEVAYHEKYPTIYHLRKKLADSTDKVDLRLIYLALAHMIKFRGHFLIEGDLNPDNSDVDKLFIQLVQTYNQLFEENPINASRVDAKAILSARLSKSRRLENLIAQLPGEKKNGLFGNLIALSLGLTPNFKSNFDLAEDAKLQLSKDTYDDDLDNLLAQIGDQYADLFLAAKNLSDAILLSDILRVNSEITKAPLSASMIKRYDEHHQDLTLLKALVRQQLPEKYKEIFFDQSKNGYAGYIDGGASQEEFYKFIKPILEKMDGTEELLAKLNREDLLRKQRTFDNGSIPYQIHLGELHAILRRQEDFYPFLKDNREKIEKILTFRIPYYVGPLARGNSRFAWMTRKSEETITPWNFEEVVDKGASAQSFIERMTNFDKNLPNEKVLPKHSLLYEYFTVYNELTKVKYVTEGMRKPAFLSGEQKKAIVDLLFKTNRKVTVKQLKEDYFKKIECFDSVEISGVEDRFNTSLGTYHDLLKIIKDKDFLDNEENEDILEDIVLTLTLFEDKEMIEERLKKYANLFDDKVMKQLKRRHYTGWGRLSRKLINGIRDKQSGKTILDFLKSDGFANRNFMQLINDDSLTFKEAIQKAQVSGQGHSLHEQIANLAGSPAIKKGILQTVKIVDELVKVMGHKPENIVIEMARENQTTQKGQKNSRERMKRIEEGIKELGSQILKEHPVENTQLQNEKLYLYYLQNGRDMYVDQELDINRLSDYDVDHIVPQSFLKDDSIDNKVLTRSDKNRGKSDNVPSEEVVKKMKNYWRQLLNAKLITQRKFDNLTKAERGGLSELDKAGFIKRQLVETRQITKHVAQILDSRMNTKYDENDKLIREVKVITLKSKLVSDFRKDFQFYKVREINNYHHAHDAYLNAVVGTALIKKYPKLESEFVYGDYKVYDVRKMIAKSEQEIGKATAKYFFYSNIMNFFKTEITLANGEIRKRPLIETNGETGEIVWDKGRDFATVRKVLSMPQVNIVKKTEVQTGGFSKESILPKRNSDKLIARKKDWDPKKYGGFDSPTVAYSVLVVAKVEKGKSKKLKSVKELLGITIMERSSFEKNPIDFLEAKGYKEVRKDLIIKLPKYSLFELENGRKRMLASAGELQKGNELALPSKYVNFLYLASHYEKLKGSPEDNEQKQLFVEQHKHYLDEIIEQISEFSKRVILADANLDKVLSAYNKHRDKPIREQAKNIIHLFTLTNLGAPAAFKYFDTTIERNRYKSIKEVLDATLIHQSITGLYEIRIDLSQLGGD

SEQ ID NO: 26 - protein, 1368 aa, Streptococcus pyogenes
MDKKYSIGLDIGTNSVGWAVITDDYKVPSKKFKVLGNTDRHSIKKNLIGALLFDSGETAEATRLKRTARRRYTRRKNRICYLQEIFSNEMAKVDDSFFHRLEESFLVEEDKKHERHPIFGNIVDEVAYHEKYPTIYHLRKKLVDSTDKADLRLIYLALAHMIKFRGHFLIEGDLNPDNSDVDKLFIQLVQTYNQLFEENPINASGVDAKAILSARLSKSRRLENLIAQLPGEKKNGLFGNLIALSLGLTPNFKSNFDLAEDAKLQLSKDTYDDDLDNLLAQIGDQYADLFLAAKNLSDAILLSDILRVNTEITKASLSASMIKRYDEHHQDLTLLKALVRQQLPEKYKEIFFDQSKNGYAGYIDGGASQEEFYKFIKPILEKMDGTEELLVKLNREDLLRKQRTFDNGSIPHQIHLGELHAILRRQEDFYPFLKDNREKIEKILTFRIPYYVGPLARGNSRFAWMTRKSEETITPWNFEEVVDKGASAQSFIERMTNFDKNLPNEKVLPKHSLLYEYFTVYNELTKVKYVTEGMRKPAFLSGEQKKAIVDLLFKTNRKVTVKQLKEDYFKKIECFDSVEISGVEDRFNASLGTYHDLLKIIKDKDFLDNEENEDILEDIVLTLTLFEDREMIEERLKTYAHLFDDKVMKQLKRRRYTGWGRLSRKLINGIRDKQSGKTILDFLKSDGFANRNFMQLIHDDSLTFKEDLQKAQVSGQGDSLHEHIANLAGSPAIKKGILQTVKVVDELVKVMGRHKPENIVIEMARENQTTQKGQKNSRERMKRIEEGIKELGSDILKEYPVENTQLQNEKLYLYYLQNGRDMYVDQELDINRLSDYDVDHIVPQSFIKDDSIDNKVLTRSDKNRGKSDNVPSEEVVKKMKNYWRQLLNAKLITQRKFDNLTKAERGGLSELDKAGFIKRQLVETRQITKHVAQILDSRMNTKYDENDKLIREVKVITLKSKLVSDFRKDFQFYKVREINNYHHAHDAYLNAVVGTALIKKYPKLESEFVYGDYKVYDVRKMIAKSEQEIGKATAKYFFYSNIMNFFKTEITLANGEIRKRPLIETNGETGEIVWDKGRDFATVRKVLSMPQVNIVKKTEVQTGGFSKESILPKRNSDKLIARKKDWDPKKYGGFDSPTVAYSVLVVAKVEKGKSKKLKSVKELLGITIMERSSFEKNPIDFLEAKGYKEVRKDLIIKLPKYSLFELENGRKRMLASAGELQKGNELALPSKYVNFLYLASHYEKLKGSPEDNEQKQLFVEQHKHYLDEIIEQISEFSKRVILADANLDKVLSAYNKHRDKPIREQAENIIHLFTLTNLGAPAAFKYFDTTIGRNRYKSIKEVLDATLIHQSITGLYETRIDLSQLGGD

SEQ ID NO: 27 - protein, 1368 aa, Streptococcus pyogenes
MDKKYSIGLDIGTNSVGWAVITDDYKVPSKKFKVLGNTDRHGIKKNLIGALLFDSGETAEATRLKRTARRRYTRRKNRICYLQEIFSNEMAKVDDSFFHRLEESFLVEEDKKHERHPIFGNIVDEVAYHEKYPTIYHLRKKLADSTDKVDLRLIYLALAHMIKFRGHFLIEGDLNPDNSDVDKLFIQLVQTYNQLFEENPINASRVDAKAILSARLSKSRRLENLIAQLPGEKKNGLFGNLIALSLGLTPNFKSNFDLAEDAKLQLSKDTYDDDLDNLLAQIGDQYADLFLAAKNLSDATLLSDILRVNSEITKAPLSASMIKRYDEHHQDLTLLKALVRQQLPEKYKEIFFDQSKNGYAGYIDGGASQEEFYKFIKPILEKMDGTEELLAKLNREDLLRKQRTFDNGSIPYQIHLGELHAILRRQEDFYPFLKDNREKIEKILTFRIPYYVGPLARGNSRFAWMTRKSEETITPWNFEEVVDKGASAQSFIERMTNFDKNLPNEKVLPKHSLLYEYFTVYNELTKVKYVTEGMRKPAFLSGEQKKAIVDLLFKTNRKVTVKQLKEDYFKKIECFDSVEISGVEDRFNASLGTYHDLLKIIKDKDFLDNEENEDILEDIVLTLTLFEDREMIEERLKTYAHLFDDKVMKQLKRRRYTGWGRLSRKLINGIRDKQSGKTILDFLKSDGFANRNFMQLIHDDSLTFKEDIQKAQVSGQGDSLHEHIANLAGSPAIKKGILQTVKVVDELVKVMGRHKPENIVIEMARENQTTQKGQKNSRERMKRIEEGIKELGSDILKEYPVENTQLQNEKLYLYYLQNGRDMYVDQELDINRLSDYDVDHIVPQSFLKDDSIDNKVLTRSDKNRGKSDNVPSEEVVKKMKNYWRQLLNAKLITQRKFDNLTKAERGGLSELDKAGFIKRQLVETRQITKHVAQILDSRMNTKYDENDKLIREVKVITLKSKLVSDFRKDFQFYKVREINNYHHAHDAYLNAVVGTALIKKYPKLESEFVYGDYKVYDVRKMIAKSEQEIGKATAKYFFYSNIMNFFKTEITLANGEIRKRPLIETNGETGEIVWDKGRDFATVRKVLSMPQVNIVKKTEVQTGGFSKESILPKRNSDKLIARKKDWDPKKYGGFDSPTVAYSVLVVAKVEKGKSKKLKSVKELLGITIMERSSFEKNPIDFLEAKGYKEVRKDLIIKLPKYSLFELENGRKRMLASAGELQKGNELALPSKYVNFLYLASHYEKLKGSPEDNEQKQLFVEQHKHYLDEIIEQISEFSKRVILADANLDKVLSAYNKHRDKPIREQAENIIHLFTLTNLGAPAAFKYFDTTIDRKRYTSTKEVLDATLIHQSITGLYETRIDLSQLGGD

SEQ ID NO: 28 - protein, 1368 aa, Streptococcus pyogenes
MDKKYSIGLDIGTNSVGWAVITDDYKVPSKKFKVLGNTDRHSIKKNLIGALLFDSGETAEATRLKRTARRRYTRRKNRICYLQEIFSNEMAKVDDSFFHRLEESFLVEEDKKHERHPIFGNIVDEVAYHEKYPTIYHLRKKLADSTDKADLRLIYLALAHMIKFRGHFLIEGDLNPDNSDVDKLFIQLVQTYNQLFEENPINASRVDAKAILSARLSKSRRLENLIAQLPGEKRNGLFGNLIALSLGLTPNFKSNFDLAEDAKLQLSKDTYDDDLDNLLAQIGDQYADLFLAAKNLSDAILLSDILRVNSEITKAPLSASMIKRYDEHHQDLTLLKALVRQQLPEKYKEIFFDQSKNGYAGYIDGGASQEEFYKFIKPILEKMDGTEELLAKLNREDLLRKQRTFDNGSIPHQIHLGELHAILRRQEDFYPFLKDNREKIEKILTFRIPYYVGPLARGNSRFAWMTRKSEETITPWNFEEVVDKGASAQSFIERMTNFDKNLPNEKVLPKHSLLYEYFTVYNELTKVKYVTEGMRKPEFLSGEQKKAIVDLLFKTNRKVTVKQLKEDYFKKIECFDSVEISGVEDRFNASLGTYHDLLKIIKDKDFLDNEENEDILEDIVLTLTLFEDREMIEERLKTYAHLFDDKVMKQLKRRRYTGWGRLSRKLINGIRDKQSGKTILDFLKSDGFANRNFMQLIHDDSLTFKEDIQKAQVSGQGDSLHEHIANLAGSPAIKKGILQTVKVVDELVKVMGRHKPENIVIEMARENQTTQKGQKNSRERMKRIEEGIKELGSDILKEYPVENTQLQNEKLYLYYLQNGRDMYVDQELDINRLSDYDVDHIVPQSFIKDDSIDNKVLTRSDKNRGKSDNVPSEEVVKKMKNYWKQLLNAKLITQRKFDNLTKAERGGLSELDKAGFIKRQLVETRQITKHVAQILDSRMNTKYDENDKLIREVKVITLKSKLVSDFRKDFQFYKVREINNYHHAHDAYLNAVVGTALIKKYPKLESEFVYGDYKVYDVRKMIAKSEQEIGKATAKYFFYSNIMNFFKTEITLANGEIRKRPLIETNGETGEIVWDKGRDFATVRKVLSMPQVNIVKKTEVQTGGFSKESILPKRNSDKLIARKKDWDPKKYGGFDSPTVAYSVLVVAKVEKGKSKKLKSVKELLGITIMERSSFEKNPIDFLEAKGYKEVRKDLIIKLPKYSLFELENGRKRMLASAGELQKGNELALPSKYVNFLYLASHYEKLKGSPEDNEQKQLFVEQHKHYLDEIIEQISEFSKRVILADANLDKVLSAYNKHRDKPIREQAENIIHLFTLTNFGAPAAFIYFDTTIGRNRYKSIKEVLDATLIHQSITGLYETRIDLSQLGGD

SEQ ID NO: 29 - protein, 1368 aa, Streptococcus pyogenes
MDKKYSIGLDIGTNSVGWAVITDDYKVPSKKFKVLGNTDRHSIKKNLIGALLFDSGETAEATRLKRTARRRYTRRKNRICYLQEIFSNEIAKVDDSFFHRLEESFLVEEDKKHERHPIFGNIVDEVAYHEKYPTIYHLRKKLADSTDKADLRLIYLALAHMIKFRGHFLIEGDLNPDNSDVDKLFIQLVQTYNQLFEENPINASRVDAKAILSARLSKSRRLENLIAQLPGEKRNGLFGNLIALSLGLTPNFKSNFDLAEDAKLQLSKDTYDDDLDNLLAQIGDQYADLFLAAKNLSDAILLSDILRVNTEITKAPLSASMIKRYDEHHQDLTLLKALVRQQLPEKYKEIFFDQSKNGYAGYIDGGASQEEFYKFIKPILEKMDGTEELLAKLNREDLLRKQRTFDNGSIPHQIHLGELHAILRRQEDFYPFLKDNREKIEKILTFRIPYYVGPLARGNSRFAWMTRKSEETITPWNFEEVVDKGASAQSFIERMTNFDKNLPNEKVLPKHSLLYEYFTVYNELTKVKYVTEGMRKPAFLSGEQKKAIVDLLFKTNRKVTVKQLKEDYFKKIECFDSVEISGVEDRFNASLGTYHDLLKIIKDKDFLDNEENEDILEDIVLTLTLFEDREMIEERLKTYAHLFDDKVMKQLKRRRYTGWGRLSRKLINGIRDKQSGKTILDFLKSDGFANRNFMQLIHDDSLTFKEDLQKAQVSGQGDSLHEHIANLAGSPAIKKGILQTVKVVDELVKVMGRHKPENIVIEMARENQTTQKGQKNSRERMKRIEEGIKELGSDILKEYPVENTQLQNEKLYLYYLQNGRDMYVDQELDINRLSDYDVDHIVPQSFLKDDSIDNKVLTRSDKNRGKSDNVPSEEVVKKMKNYWKQLLNAKLITQRKFDNLTKAERGGLSELDKAGFIKRQLVETRQITKHVAQILDSRMNTKYDENDKLIREVRVITLKSKLVSDFRKDFQFYKVREINNYHHAHDAYLNAVVGTALIKKYPKLESEFVYGDYKVYDIRKMIAKSEQEIGKATAKYFFYSNIMNFFKTEITLANGEIRKRPLIETNGETGEIVWDKGRDFATVRKVLSMPQVNIVKKTEVQTGGFSKESILPKRNSDKLIARKKDWDPKKYGGFDSPTVAYSVLVVAKVEKGKSKKLKSVKELVGITIMERSSFEKDPVDFLEAKGYKEVRKDLIIKLPKYSLFELENGRKRMLASAGELQKGNELALPSKYVNFLYLASHYEKLKGSPEDNEQKQLFVEQHKHYLDEIIEQISEFSKRVILADANLDKVLSAYNKHRDKPIREQAENIIHLFTLTNLGAPAAFKYFDTTIGRNRYKSIKEVLDATLIHQSITGLYETRIDLSQLGGD

SEQ ID NO: 30 - protein, 1368 aa, Streptococcus pyogenes
MDKKYSIGLDIGTNSVGWAVITDDYKVPSKKFKVLGNTDRHSIKKNLIGALLFDSGETAEATRLKRTARRRYTRRKNRICYLQEIFSNEIAKVDDSFFHRLEESFLVEEDKKHERHPIFGNIVDEVAYHEKYPTIYHLRKKLADSTDKADLRLIYLALAHMIKFRGHFLIEGGLNPDNSDVDKLFIQLVQTYNQLFEENPINASRVDAKAILSARLSKSRRLENLIAQLPGEKRNGLFGNLIALSLGLTPNFKSNFDLAEDAKLQLSKDTYDDDLDNLLAQIGDQYADLFLAAKNLSDAILLSDILRVNTEITKAPLSASMIKRYDEHHQDLTLLKALVRQQLPEKYKEIFFDQSKNGYAGYIDGGASQEEFYKFIKPILEKMDGTEELLAKLNREDLLRKQRTFDNGSIPHQIHLGELHAILRRQEDFYPFLKDNREKIEKILTFRIPYYVGPLARGNSRFAWMTRKSEETITPWNFEEVVDKGASAQSFIERMTNFDKNLPNEKVLPKHSLLYEYFTVYNELTKVKYVTEGMRKPAFLSGEQKKAIVDLLFKTNRKVTVKQLKEDYFKKIECFDSVEISGVEDRFNASLGTYHDLLKIIKDKDFLDNEENEDILEDIVLTLTLFEDREMIEERLKTYAHLFDDKVMKQLKRRRYTGWGRLSRKLINGIRDKQSGKTILDFLKSDGFANRNFMQLIHDDSLTFKEDLQKAQVSGQGDSLHEHIANLAGSPAIKKGILQTVKVVDELVKVMGRHKPENIVIEMARENQTTQKGQKNSRERMKRIEEGIKELGSDILKEYPVENTQLQNEKLYLYYLQNGRDMYVDQELDINRLSDYDVDHIVPQSFLKDDSIDNKVLTRSDKNRGKSDNVPSEEVVKKMKNYWKQLLNAKLITQRKFDNLTKAERGGLSELDKAGFIKRQLVETRQITKHVAQILDSRMNTKYDENDKLIREVRVITLKSKLVSDFRKDFQFYKVREINNYHHAHDAYLNAVVGTALIKKYPKLESEFVYGDYKVYDIRKMIAKSEQEIGKATAKYFFYSNIMNFFKTEITLANGEIRKRPLIETNGETGEIVWDKGRDFATVRKVLSMPQVNIVKKTEVQTGGFSKESILPKRNSDKLIARKKDWDPKKYGGFDSPTVAYSVLVVAKVEKGKSKKLKSVKELVGITIMERSSFEKDPVDFLEAKGYKEVRKDLIIKLPKYSLFELENGRKRMLASAGELQKGNELALPSKYVNFLYLASHYEKLKGSPEDNEQKQLFVEQHKHYLDEIIEQISEFSKRVILADANLDKVLSAYNKHRDKPIREQAENIIHLFTLTNLGAPAAFKYFDTTIGRNRYKSIKEVLDATLIHQSITGLYETRIDLSQLGGD

SEQ ID NO: 31 - protein, 1368 aa, Streptococcus pyogenes
MDKKYSIGLDIGTNSVGWAVITDDYKVPSKKFKVLGNTDRHSIKKNLIGALLFDSGETAEATRLKRTARRRYTRRKNRICYLQEIFSNEMAKVDDSFFHRLEESFLVEEDKKHERHPIFGNIVDEVAYHEKYPTIYHLRKKLVDSTDKADLRLIYLALAHMIKFRGHFLIEGDLNPDNSDVDKLFIQLVQTYNQLFEENPINANGVDAKAILSARLSKSRRLENLIAQLPGEKKNGLFGNLIALSLGLTPNFKSNFDLAEDAKLQLSKDTYDDDLDNLLAQIGDQYADLFLAAKNLSDAILLSDILRVNTEITKAPLSASMIKRYDEHHQDLTLLKALVRQQLPEKYKEIFFDQSKNGYAGYIDGGASQEEFYKFIKPILEKMDGTEELLVKLNREDLLRKQRTFDNGSIPHQIHLGELHAILRRQEDFYPFLKDNREKIEKILTFRIPYYVGPLARGNSRFAWMTRKSEETITPWNFEEVVDKGASAQSFIERMTNFDKNLPNEKVLPKHSLLYEYFTVYNELTKVKYVTEGMRKPAFLSGEQKKAIVDLLFKTNRKVTVKQLKEDYFKKIECFDSVEISGVEDRFNASLGTYHDLLKIIKDKDFLDNEENEDILEDIVLTLTLFEDREMIEERLKTYAHLFDDKVMKQLKRRRYTGWGRLSRKLINGIRDKQSGKTILDFLKSDGFANRNFMQLIHDDSLTFKEDIQKAQVSGQGDSLHEHIANLAGSPAIKKGILQTVKVVDELVKVMGRHKPENIVIEMARENQTTQKGQKNSRERMKRIEEGIKELGSQILKEHPVENTQLQNEKLYLYYLQNGRDMYVDQELDINRLSDYDVDHIVPQSFLKDDSIDNKVLTRSDKNRGKSDNVPSEEVVKKMKNYWRQLLNAKLITQRKFDNLTKAERGGLSELDKAGFIKRQLVETRQITKHVAQILDSRMNTKYDENDKLIREVKVITLKSKLVSDFRKDFQFYKVREINNYHHAHDAYLNAVVGTALIKKYPKLESEFVYGDYKVYDVRKMIAKSEQEIGKATAKYFFYSNIMNFFKTEITLANGEIRKRPLIETNGETGEIVWDKGRDFATVRKVLSMPQVNIVKKTEVQTGGFSKESILPKRNSDKLIARKKDWDPKKYGGFDSPTVAYSVLVVAKVEKGKSKKLKSVKELLGITIMERSSFEKNPIDFLEAKGYKEVKKDLIIKLPKYSLFELENGRKRMLASAGELQKGNELALPSKYVNFLYLASHYEKLKGSPEDNEQKQLFVEQHKHYLDEIIEQISEFSKRVILADANLDKVLSAYNKHRDKPIREQAENIIHLFTLTNLGAPAAFKYFDTTIDRKRYTSTKEVLDATLIHQSITGLYETRIDLSQLGGD

SEQ ID NO: 32 - protein, 1368 aa, Streptococcus pyogenes
MDKKYSIGLDIGTNSVGWAVITDDYKVPSKKFKVLGNTDRHSIKKNLIGALLFDSGETAEATRLKRTARRRYTRRKNRICYLQEIFSNEMAKVDDSFFHRLEESFLVEEDKKHERHPIFGNIVDEVAYHEKYPTIYHLRKKLADSTDKADLRLIYLALAHMIKFRGHFLIEGDLNPDNSDVDKLFIQLVQTYNQLFEENPINASRVDAKAILSARLSKSRRLENLIAQLPGEKKNGLFGNLIALLLGLTPNFKSNFDLAEDAKLQLSKDTYDDDLDNLLAQIGDQYADLFLAAKNLSDAILLSDILRVNSEITKAPLSASMIKRYDEHHQDLTLLKALVRQQLPEKYKEIFFDQSKNGYAGYIDGGASQEEFYKFIKPILEKMDGTEELLAKLNREDLLRKQRTFDNGSIPHQIHLGELHAILRRQEDFYPFLKDNREKIEKILTFRIPYYVGPLARGNSRFAWMTRKSEETITPWNFEEVVDKGASAQSFIERMTNFDKNLPNEKVLPKHSLLYEYFTVYNELTKVKYVTEGMRKPAFLSGEQKKAIVDLLFKTNRKVTVKQLKEDYFKKIECFDSVEISGVEDRFNASLGTYHDLLKIIKDKDFLDNEENEDILEDIVLTLTLFEDKEMIEERLKKYAHLFDDKVMKQLKRRRYTGWGRLSRKLINGIRDKQSGKTILDFLKSDGFANRNFMQLIHDDSLTFKEDIQKAQVSGQGDSLHEHIANLAGSPAIKKGILQTVKVVDELVKVMGRHKPENIVIEMARENQTTQKGQKNSRERMKRIEEGIKELGSDILKEYPVENTQLQNEKLYLYYLQNGRDMYVDQELDINRLSDYDVDHIVPQSFLKDDSIDNKVLTRSDKNRGKSDNVPSEEVVKKMKNYWKQLLNAKLITQRKFDNLTKAERGGLSELDKAGFIKRQLVETRQITKHVAQILDSRMNTKYDENDKLIREVRVITLKSKLVSDFRKDFQFYKVREINNYHHAHDAYLNAVVGTALIKKYPKLESEFVYGDYKVYDVRKMIAKSEQEIGKATAKYFFYSNIMNFFKTEITLANGEIRKRPLIETNGETGEIVWDKGRDFATVRKVLSMPQVNIVKKTEVQTGGFSKESILPKRNSDKLIARKKDWDPKKYGGFDSPTVAYSVLVVAKVEKGKSKKLKSVKELLGITIMERSSFEKNPIDFLEAKGYKEVRKDLIIKLPKYSLFELENGRKRMLASAGELQKGNELALPSKYVNFLYLASHYEKLKGSPEDNEQKQLFVEQHKHYLDEIIEQISEFSKRVILADANLDKVLSAYNKHRDKPIREQAENIIHLFTLTNLGAPAAFKYFDTTIDRKRYTSTKEVLDATLIHQSITGLYETRIDLSQLGGD

SEQ ID NO: 33 - protein, 1368 aa, Streptococcus pyogenes
MDKKYSIGLDIGTNSVGWAVITDDYKVPSKKFKVLGNTDRHSIKKNLIGALLFDSGEIAEATRLKRTARRRYTRRKNRICYLQEIFSNEMAKVDDSFFHRLEESFLVEEDKKHERHPIFGNIVDEVAYHEKYPTIYHLRKKLVDSTDKADLRLIYLALAHMIKFRGHFLIEGDLNPDNSDVDKLFIQLVQTYNQLFEENPINASGVDAKAILSARLSKSRRLENLIAQLPGEKKNGLFGNLIALSLGLTPNFKSNFDLAEDAKLQLSKDTYDDDLDNLLAQIGDQYADLFLAAKNLSDAILLSDILRLNSEITKAPLSASMIKRYDEHHQDLTLLKALVRQQLPEKYKEIFFDQSKNGYAGYIDGGASQEEFYKFIKPILEKMDGTEELLAKLNRKDLLRKQRTFDNGSIPHQIHLGELHAILRRQEDFYPFLKDNREKIEKILTFRIPYYVGPLARGNSRFAWMTRKSEETITPWNFEEVVDKGASAQSFIERMTNFDKNLPNEKVLPKHSLLYEYFTVYNELTKVKYVTEGMRKPAFLSGEQKKAIVDLLFKTNRKVTVKQLKEDYFKKIECFDSVEISGVEDRFNASLGTYHDLLKIIKDKDFLDNEENEDILEDIVLTLTLFEDREMIEERLKTYAHLFDDKVMKQLKRRRYTGWGRLSRKLINGIRDKQSGKTILDFLKSDGFANRNFMQLIHDDSLTFKEDIQKAQVSGQGDSLHEHIANLAGSPAIKKGILQTVKVVDELVKVMGRHKPENIVIEMARENQTTQKGQKNSRERMKRIEEGIKELGSQILKEHPVENTQLQNEKLYLYYLQNGRDMYVDQELDINRLSDYDVDHIVPQSFIKDDSIDNKVLTRSDKNRGKSDNVPSEEVVKKMKNYWRQLLNAKLITQRKFDNLTKAERGGLSELDKAGFIKRQLVETRQITKHVAQILDSRMNTKYDENDKLIREVKVITLKSKLVSDFRKDFQFYKVREINNYHHAHDAYLNAVVGTALIKKYPKLESEFVYGDYKVYDVRKMLAKSEQEIGKATAKYFFYSNIMNFFKTEITLANGEIRKRPLIETNGETGEIVWDKGRDFATVRKVLSMPQVNIVKKTEVQTGGFSKESILPKRNSDKLIARKKDWDPKKYGGFDSPTVAYSVLVVAKVEKGKSKKLKSVKELLGITIMERSSFEKNPIDFLEAKGYKEVRKDLIIKLPKYSLFELENGRKRMLASAGELQKGNELALPSKYVNFLYLASHYEKLKGSPEDNEQKQLFVEQHKHYLDEIIEQISEFSKRVILADANLDKVLSAYNKHRDKPIREQAENIIHLFTLTNLGAPTAFKYFDTTIDRKRYTSTKEVLDATFIHQSITGLYETRIDLSQLGGD

SEQ ID NO: 34 - protein, 1193 aa, Streptococcus pyogenes
PDNSDVDKLFIQLVQTYNQLFEENPINASGVDAKAILSARLSKSRRLENLIAQLPGEKKNGLFGNLIALSLGLTPNFKSNFDLAEDAKLQLSKDTYDDDLDNLLAQIGDQYADLFLAAKNLSDAILLSDILRVNTEITKAPLSASMIKRYDEHHQDLTLLKALVRQQLPEKYKEIFFDQSKNGYAGYIDGGASQEEFYKFIKPILEKMDGTEELLVKLNREDLLRKQRTFDNGSIPHQIHLGELHAILRRQEDFYPFLKDNREKIEKILTFRIPYYVGPLARGNSRFAWMTRKSEETITPWNFEEVVDKGASAQSFIERMTNFDKNLPNEKVLPKHSLLYEYFTVYNELTKVKYVTEGMRKPAFLSGEQKKAIVDLLFKTNRKVTVKQLKEDYFKKIECFDSVEISGVEDRFNASLGTYHDLLKIIKDKDFLDNEENEDILEDIVLTLTLFEDREMIEERLKTYAHLFDDKVMKQLKRRRYTGWGRLSRKLINGIRDKQSGKTILDFLKSDGFANRNFMQLIHDDSLTFKEDIQKAQVSGQGDSLHEHIANLAGSPAIKKGILQTVKVVDELVKVMGRHKPENIVIEMARENQTTQKGQKNSRERMKRIEEGIKELGSQILKEHPVENTQLQNEKLYLYYLQNGRDMYVDQELDINRLSDYDVDHIVPQSFLKDDSIDNKVLTRSDKNRGKSDNVPSEEVVKKMKNYWRQLLNAKLITQRKFDNLTKAERGGLSELDKAGFIKRQLVETRQITKHVAQILDSRMNTKYDENDKLIREVKVITLKSKLVSDFRKDFQFYKVREINNYHHAHDAYLNAVVGTALIKKYPKLESEFVYGDYKVYDVRKMIAKSEQEIGKATAKYFFYSNIMNFFKTEITLANGEIRKRPLIETNGETGEIVWDKGRDFATVRKVLSMPQVNIVKKTEVQTGGFSKESILPKRNSDKLIARKKDWDPKKYGGFDSPTVAYSVLVVAKVEKGKSKKLKSVKELLGITIMERSSFEKNPIDFLEAKGYKEVKKDLIIKLPKYSLFELENGRKRMLASAGELQKGNELALPSKYVNFLYLASHYEKLKGSPEDNEQKQLFVEQHKHYLDEIIEQISEFSKRVILADANLDKVLSAYNKHRDKPIREQAENIIHLFTLTNLGAPAAFKYFDTTIDRKRYTSTKEVLDATLIHQSITGLYETRIDLSQLGGD

SEQ ID NO: 35 - protein, 1368 aa, Streptococcus pyogenes
MDKKYSIGLDIGTNSVGWAVITDDYKVPSKKFKVLGNTDRHSIKKNLIGALLFDSGETAEATRLKRTARRRYTRRKNRICYLQEIFSNEMAKVDDSFFHRLEESFLVEEDKKHERHPIFGNIVDEVAYHEKYPTIYHLRKKLADSTDKADLRLIYLALAHMIKFRGHFLIEGDLNPDNSDVDKLFIQLVQTYNQLFEENPINASRVDAKAILSARLSKSRRLENLIAQLPGEKKNGLFGNLIALSLGLTPNFKSNFDLAEDAKLQLSKDTYDDDLDNLLAQIGDQYADLFLAAKNLSDATLLSDILRVNSEITKAPLSASMIKRYDEHHQDLTLLKALVRQQLPEKYKEIFFDQSKNGYAGYIDGGASQEEFYKFIKPILEKMDGTEELLAKLNREDLLRKQRTFDNGSIPHQIHLGELHAILRRQEDFYPFLKDNREKIEKILTFRIPYYVGPLARGNSRFAWMTRKSEETITPWNFEEVVDKGASAQSFIERMTNFDKNLPNEKVLPKHSLLYEYFTVYNELTKVKYVTEGMRKPAFLSGEQKKAIVDLLFKTNRKVTVKQLKEDYFKKIECFDSVEISGVEDRFNASLGTYHDLLKIIKDKDFLDNEENEDILEDIVLTLTLFEDREMIEERLKTYAHLFDDKVMKQLKRRRYTGWGRLSRKLINGIRDKQSGKTILDFLKSDGFANRNFMQLIHDDSLTFKEDIQKAQVSGQGDSLHEHIANLAGSPAIKKGILQTVKVVDELVKVMGRHKPENIVIEMARENQTTQKGQKNSRERMKRIEEGIKELGSDILKEYPVENTQLQNEKLYLYYLQNGRDMYVDQELDINRLSDYDVDHIVPQSFLKDDSIDNKVLTRSDKNRGKSDNVPSEEVVKKMKNYWRQLLNAKLITQRKFDNLTKAERGGLSELDKAGFIKRQLVETRQITKHVAQILDSRMNTKYDENDKLIREVKVITLKSKLVSDFRKDFQFYKVREINNYHHAHDAYLNAVVGTALIKKYPKLESEFVYGDYKVYDVRKMIAKSEQEIGKATAKYFFYSNIMNFFKTEITLANGEIRKRPLIETNGETGEIVWDKGRDFATVRKVLSMPQVNIVKKTEVQTGGFSKESILPKRNSDKLIARKKDWDPKKYGGFDSPTVAYSVLVVAKVEKGKSKKLKSVKELLGITIMERSSFEKNPIDFLEAKGYKEVRKDLIIKLPKYSLFELENGRKRMLASAGELQKGNELALPSKYVNFLYLASHYEKLKGSPEDNEQKQLFVEQHKHYLDEIIEQISEFSKRVILADANLDKVLSAYNKHRDKPIREQAENIIHLFTLTNLGAPAAFKYFDTTIDRKRYTSTKEVLDATLIHQSITGLYETRIDLSQLGGD

SEQ ID NO: 36 - protein, 1367 aa, Streptococcus pyogenes
MDKKYSIGLDIGTNSVGWAVITDDYKVPSKKFKVLGNTDRHSIKKNLIGALLFDSGETAEATRLKRTARRRYTRRKNRICYLQEIFSNEMAKVDDSFFHRLEESFLVEEDKKHERHPIFGNIVDEVAYHEKYPTIYHLRKKLADSTDKVDLRLIYLALAHMIKFRGHFLIEGDLNPDNSDVDKLFIQLVQTYNQLFEENPINASRVDAKAILSARLSKSRRLENLIAQLPGEKKNGLFGNLIALSLGLTPNFKSNFDLAEDTKLQLSKDTYDDDLDNLLAQIGDQYADLFLAAKNLSDAILLSDILRVNSEITKAPLSASMIKRYDEHHQDLTLLKALVRQQLPEKYKEIFFDQSKNGYAGYIDGGASQEEFYKFIKPILEKMDGTEELLAKLNREDLLRKQRTFDNGSIPYQIHLGELHAILRRQEDFYPFLKDNREKIEKILTFRIPYYVGPLARGNSRFAWMTRKSEETITPWNFEEVVDKGASAQSFIERMTNFDKNLPNEKVLPKHSLLYEYFTVYNELTKVKYVTEGMRKPAFLSGEQKKAIVDLLFKTNRKVTVKQLKEDYFKKIECFDSVEISGVEDRFNTSLGTYHDLLKIIKDKDFLDNEENEDILEDIVLTLTLFEDKEMIEERLKKYANLFDDKVMKQLKRRHYTGWGRLSRKLINGIRDKQSGKTILDFLKSDGFANRNFMQLINDDSLTFKEAIQKAQVSGQGHSLHEQIANLAGSPAIKKGILQTVKIVDELVKVMGHKPENIVIEMARENQTTQKGQKNSRERMKRIEEGIKELGSQILKEHPVENTQLQNEKLYLYYLQNGRDMYVDQELDINRLSDYDVDHIVPQSFLKDDSIDNKVLTRSDKNRGKSDNVPSEEVVKKMKNYWRQLLNAKLITQRKFDNLTKAERGGLSELDKAGFIKRQLVETRQITKHVAQILDSRMNTKYDENDKLIREVKVITLKSKLVSDFRKDFQFYKVREINNYHHAHDAYLNAVVGTALIKKYPKLESEFVYGDYKVYDVRKMIAKSEQEIGKATAKYFFYSNIMNFFKTEITLANGEIRKRPLIETNGETGEIVWDKGRDFATVRKVLSMPQVNIVKKTEVQTGGFSKESILPKRNSDKLIARKKDWDPKKYGGFDSPTVAYSVLVVAKVEKGKSKKLKSVKELLGITIMERSSFEKNPIDFLEAKGYKEVRKDLIIKLPKYSLFELENGRKRMLASAGELQKGNELALPSKYVNFLYLASHYEKLKGSPEDNEQKQLFVEQHKHYLDEIIEQISEFSKRVILADANLDKVLSAYNKHRDKPIREQAKNIIHLFTLTNLGAPAAFKYFDTTIERNRYKSIKEVLDATLIHQSITGLYETRIDLSQLGGD

SEQ ID NO: 37 - protein, 1368 aa, Streptococcus pyogenes
MDKKYSIGLDIGTNSVGWAVITDDYKVPSKKFKVLGNTDRHSIKKNLIGALLFDSGETAEATRLKRTARRRYTRRKNRICYLQEIFSNEMAKVDDSFFHRLEESFLVEEDKKHERHPIFGNIVDEVAYHEKYPTIYHLRKKLADSTDKADLRLIYLALAHMIKFRGHFLIEGDLNPDNSDVDKLFIQLVQTYNQLFEENLINASRVDAKAILSARLSKSRRLENLIAQLPGEKRNGLFGNLIALSLGLTPNFKSNFDLAEDAKLQLSKDTYDDDLDNLLAQIGDQYADLFLAAKNLSDAILLSDILRVNSEITKAPLSASMIKRYDEHHQDLTLLKALVRQQLPEKYKEIFFDQSKNGYAGYIDGGASQEEFYKFIKPILEKMDGTEELLAKLNREDLLRKQRTFDNGSIPHQIHLGELHAILRRQEDFYPFLKDNREKIEKILTFRIPYYVGPLARGNSRFAWMTRKSEETITPWNFEEVVDKGASAQSFIERMTNFDKNLPNEKVLPKHSLLYEYFTVYNELTKVKYVTEGMRKPAFLSGEQKKAIVDLLFKTNRKVTVKQLKEDYFKKIECFDSVEISGVEDRFNASLGTYHDLLKIIKDKDFLDNEENEDILEDIVLTLTLFEDREMIEERLKTYAHLFDDKVMKQLKRRRYTGWGRLSRKLINGIRDKQSGKTILDFLKSDGFANRNFMQLIHDDSLTFKEDIQKAQVSGQGDSLHEHIANLAGSPAIKKGILQTVKIVDELVKVMGRHKPENIVIEMARENQTTQKGQKNSRERMKRIEEGIKELGSDILKEYPVENTQLQNEKLYLYYLQNGRDMYVDQELDINRLSDYDVDHIVPQSFLKDDSIDNKVLTRSDKNRGKSDNVPSEEVVKKMKNYWKQLLNAKLITQRKFDNLTKAERGGLSELDKAGFIKRQLVETRQITKHVAQILDSRMNTKYDENDKLIREVKVITLKSKLVSDFRKDFQFYKVREINNYHHAHDAYLNAVVGTALIKKYPKLESEFVYGDYKVYDVRKMIAKSEQEIGKATAKYFFYSNIMNFFKTEITLANGEIRKRPLIETNGETGEIVWDKGRDFATVRKVLSMPQVNIVKKTEVQTGGFSKESILPKRNSDKLIARKKDWDPKKYGGFDSPTVAYSVLVVAKVEKGKSKKLKSVKELLGITIMERSSFEKNPIDFLEAKGYKEVRKDLIIKLPKYSLFELENGRKRMLASAGELQKGNELALPSKYVNFLYLASHYEKLKGSPEDNEQKQLFVEQHKHYLDEIIEQISEFSKRVILADANLDKVLSAYNKHRDKPIREQAENIIHLFTLTNLGAPAAFKYFDTTIGRNRYKSIKEVLDATLIHQSITGLYETRIDLSQLGGD

SEQ ID NO: 38 - protein, 1279 aa, Streptococcus pyogenes
MAKVDDSFFHRLEESFLVEEDKKHERHPIFGNIVDEVAYHEKYPTIYHLRKKLVDSTDKADLRLIYLALAHMIKFRGHFLIEGDLNPDNSDVDKLFIQLVQTYNQLFEENPINASGVDAKAILSARLSKSRRLENLIAQLPGEKKNGLFGNLIALSLGLTPNFKSNFDLAEDAKLQLSKDTYDDDLDNLLAQIGDQYADLFLAAKNLSDAILLSDILRVNTEITKAPLSASMIKRYDEHHQDLTLLKALVRQQLPEKYKEIFFDQSKNGYAGYIDGGASQEEFYKFIKPILEKMDGTEELLVKLNREDLLRKQRTFDNGSIPHQIHLGELHAILRRQEDFYPFLKDNREKIEKILTFRIPYYVGPLARGNSRFAWMTRKSEETITPWNFEEVVDKGASAQSFIERMTNFDKNLPNEKVLPKHSLLYEYFTVYNELTKVKYVTEGMRKPAFLSGEQKKAIVDLLFKTNRKVTVKQLKEDYFKKIECFDSVEISGVEDRFNASLGTYHDLLKIIKDKDFLDNEENEDILEDIVLTLTLFEDREMIEERLKTYAHLFDDKVMKQLKRRRYTGWGRLSRKLINGIRDKQSGKTILDFLKSDGFANRNFMQLIHDDSLTFKEDIQKAQVSGQGDSLHEHIANLAGSPAIKKGILQTVKVVDELVKVMGRHKPENIVIEMARENQTTQKGQKNSRERMKRIEEGIKELGSQILKEHPVENTQLQNEKLYLYYLQNGRDMYVDQELDINRLSDYDVDHIVPQSFLKDDSIDNKVLTRSDKNRGKSDNVPSEEVVKKMKNYWRQLLNAKLITQRKFDNLTKAERGGLSELDKAGFIKRQLVETRQITKHVAQILDSRMNTKYDENDKLIREVKVITLKSKLVSDFRKDFQFYKVREINNYHHAHDAYLNAVVGTALIKKYPKLESEFVYGDYKVYDVRKMIAKSEQEIGKATAKYFFYSNIMNFFKTEITLANGEIRKRPLIETNGETGEIVWDKGRDFATVRKVLSMPQVNIVKKTEVQTGGFSKESILPKRNSDKLIARKKDWDPKKYGGFDSPTVAYSVLVVAKVEKGKSKKLKSVKELLGITIMERSSFEKNPIDFLEAKGYKEVKKDLIIKLPKYSLFELENGRKRMLASAGELQKGNELALPSKYVNFLYLASHYEKLKGSPEDNEQKQLFVEQHKHYLDEIIEQISEFSKRVILADANLDKVLSAYNKHRDKPIREQAENIIHLFTLTNLGAPAAFKYFDTTIDRKRYTSTKEVLDATLIHQSITGLYETRIDLSQLGGD

SEQ ID NO: 39 - protein, 543 aa, Streptococcus pyogenes MGAS2111
QELDINRLSGYDVDHIVPQSFLKDDSIDNKVLTRSDKNRGKSDNVPSEEVVKKMKNYWRQLLNAKLITQRKFDNLTKAERGGLSELDKVGFIKRQLVETRQITKHVAQILDSRMNTKYDENDKLIREVRVITLKSKLVSDFRKDFQFYKVREINNYHHAHDAYLNAVVGTALIKKYPKLESEFVYGDYKVYDVRKMIAKSEQEIGKATAKYFFYSNIMNFFKTEITLANGEIRKRPLIETNGETGEIVWDKGRDFATVRKVLSMPQVNIVKKTEVQTGGFSKESILPKRNSDKLIARKKDWDPKKYGGFDSPTVAYSVLVVAKVEKGKSKKLKSVKELLGITIMERSSFEKDPIDFLEAKGYKEVRKDLIIKLPKYSLFELENGRKRMLASAGELQKGNELALPSKYVNFLYLASHYEKLKGSPEDNEQKQLFVEQHKHYLDEIIEQISEFSKRVILADANLDKVLSAYNKHRDKPIREQAENIIHLFTLTNLGAPAAFKYFDTTIDRKRYTSTKEVLDATLIHQSITGLYETRIDLSQLGGD

SEQ ID NO: 40 - protein, 306 aa, Streptococcus pyogenes SS1447
IETNGETGEIVWDKGRDFATVRKVLSMPQVNIVKKTEVQTGGFSKESILPKRNSDKLIARKKDWDPKKYGGFDSPTVAYSVLVVAKVEKGKSKKLKSVKELLGITIMERSSFEKDPIDFLEAKGYKEVRKDLIIKLPKYSLFELENGRKRMLASAGELQKGNELALPSKYVNFLYLASHYEKLKGSPEDNEQKQLFVEQHKHYLDEIIEQISEFSKRVILADANLDKVLSAYNKHRDKPIREQAENIIHLFTLTNLGAPAAFKYFDTTIDRKRYTSTKEVLDATLIHQSITGLYETRIDLSQLGGD

SEQ ID NO: 41 - protein, 1368 aa, Streptococcus
MDKKYSIGLDIGTNSVGWAVITDDYKVPSKKFKVLGNTDRHSIKKNLIGALLFDSGEIAEATRLKRTARRRYTRRKNRICYLQEIFSNEMAKVDDSFFHRLEESFLVEEDKKHERHPIFGNIVDEVAYHEKYPTIYHLRKKLVDSTDKADLRLIYLALAHMIKFRGHFLIEGDLNPDNSDVDKLFIQLVQTYNQLFEENPINASGVDAKAILSARLSKSRRLENLIAQLPGEKKNGLFGNLIALSLGLTPNFKSNFDLAEDAKLQLSKDTYDDDLDNLLAQIGDQYADLFLAAKNLSDAILLSDILRLNSEITKAPLSASMIKRYDEHHQDLTLLKALVRQQLPEKYKEIFFDQSKNGYAGYIDGGASQEEFYKFIKPILEKMDGTEELLAKLNREDLLRKQRTFDNGSIPHQIHLGELHAILRRQEDFYPFLKDNREKIEKILTFRIPYYVGPLARGNSRFAWMTRKSEETITPWNFEEVVDKGASAQSFIERMTNFDKNLPNEKVLPKHSLLYEYFTVYNELTKVKYVTEGMRKPAFLSGEQKKAIVDLLFKTNRKVTVKQLKEDYFKKIECFDSVEISGVEDRFNASLGTYHDLLKIIKDKDFLDNEENEDILEDIVLTLTLFEDREMIEERLKTYAHLFDDKVMKQLKRRRYTGWGRLSRKLINGIRDKQSGKTILDFLKSDGFANRNFMQLIHDDSLTFKEDIQKAQVSGQGDSLHEHIANLAGSPAIKKGILQTVKVVDELVKVMGRHKPENIVIEMARENQTTQKGQKNSRERMKRIEEGIKELGSQILKEHPVENTQLQNEKLYLYYLQNGRDMYVDQELDINRLSDYDVDHIVPQSFIKDDSIDNKVLTRSDKNRGKSDNVPSEEVVKKMKNYWRQLLNAKLITQRKFDNLTKAERGGLSELDKAGFIKRQLVETRQITKHVAQILDSRMNTKYDENDKLIREVKVITLKSKLVSDFRKDFQFYKVREINNYHHAHDAYLNAVVGTALIKKYPKLESEFVYGDYKVYDVRKMLAKSEQEIGKATAKYFFYSNIMNFFKTEITLANGEIRKRPLIETNGETGEIVWDKGRDFATVRKVLSMPQVNIVKKTEVQTGGFSKESILPKRNSDKLIARKKDWDPKKYGGFDSPTVAYSVLVVAKVEKGKSKKLKSVKELLGITIMERSSFEKNPIDFLEAKGYKEVRKDLIIKLPKYSLFELENGRKRMLASAGELQKGNELALPSKYVNFLYLASHYEKLKGSPEDNEQKQLFVEQHKHYLDEIIEQISEFSKRVILADANLDKVLSAYNKHRDKPIREQAENIIHLFTLTNLGAPTAFKYFDTTIDRKRYTSTKEVLDATFIHQSITGLYETRIDLSQLGGD

SEQ ID NO: 42 - protein, 1345 aa, Streptococcus
MDQKYSIGLDIGTNSVGWAVVTDDYKVPAKKMKVLGNTDKQSIKKNLLGALLFDSGETAEATRLKRTARRRYTRRRNRLRYLQEIFAEEMNKVDENFFQRLDDSFLVDEDKRGERHPIFGNIAAEVKYHDDFPTIYHLRKHLADISQKADLRLVYLALAHMIKFRGHFLIEGQLKAENTNVQALFKDFVEVYDKTVEESHLSEMTVDALSILTEKVSKSRRLENLIAHYPAEKKNTLFGNLIALSLGLQPNFKTNFQLSEDAKLQFSKDTYEEDLEGLLGEIGDEYADLFASAKNLYDAILLSGILTVDDNSTKAPLSASMVKRYEEHQKDLKKLKDFIKVNAPDQYNAIFKDKNKKGYAGYIENGVKQDEFYKYLKGILLQINGSGDFLDKIDREDFLRKQRTFDNGSIPHQIHLQEMHAILRRQEEHYPFLKENQDKIEKILTFRIPYYVGPLARKGSRFAWAEYKADEKITPWNFDDILDKEKSAEKFITRMTLNDLYLPEEKVLPKHSLLYETFTVYNELTKVKYVNEQGEAKFFDANMKQEIFDHVFKENRKVTKDKLLNYLNKEFEEFRIVNLTGLDKENKAFNSSLGTYHDLRKILDKSFLDDKANEKTIEDIIQTLTLFEDREMIRQRLQKYSDIFTKAQLKKLERRHYTGWGRLSYKLINGIRNKENKKTILDYLIDDGYANRNFMQLINDDALSFKEEIARAQIIGDVDDIANVVHDLPGSPAIKKGILQSVKIVDELVKVMGHNPANIIIEMARENQMTDKGRRNSQQRLKLLQDSLKNLDNPVNIKNVENQQLQNDRLFLYYIQNGKDMYTGETLDINNLSQYDIDHIIPQAFIKDNSLDNRVLTRSDKNRGKSDDVPSIEVVHEMKSFWSKLLSVKLITQRKFDNLTKAERGGLTEEDKAGFIKRQLVETRQITKHVAQILDERFNTEFDGNKRRIRNVKIITLKSNLVSNFRKEFELYKVREINDYHHAHDAYLNAVVGNALLLKYPQLEPEFVYGEYPKYNSYRSRKSATEKFLFYSNILRFFKKEDIQTNEDGEIAWNKEKHIKILRKVLSYPQVNIVKKTEEQTGGFSKESILPKGESDKLIPRKTKNSYWNPKKYGGFDSPVVAYSILVFADVEKGKSKKLRKVQDMVGITIMEKKRFEKHPVDFLEQRGYRNVRLEKIIKLPKYSLFELENKRRRLLASARELQKGNELVIPQRFTTLLYHSYQIEKNYEPEHREYVEKHKDEFKELLEYISVFSRKYVLADNNLTKIEMLFSKNKDAEVSSLAKSFISLLTFTAFGAPAAFNFFGENIDRKRYTSVTECLNATLIHQSITGLYETRIDLSKLGED

SEQ ID NO: 43 - protein, 1373 aa, Streptococcus
MTKKNYSIGLDIGTNSVGWAVITDDYKVPAKKMKVLGNTDKKYIKKNLLGALLFDSGETAEATRLKRTARRRYTRRKNRLRYLQEIFAEEMTKVDESFFQRLDESFLRWDDDNKKLGRYPIFGNKADVVKYHQEFPTIYHLRKHLADSSEKADLRLVYLALAHMIKFRGHFLIEGELNAENTDVQKIFADFVGVYDRTFDDSHLSEITVDAASILTEKISKSRRLENLIKYYPTEKKNTLFGNLIALALGLQPNFKMNFKLSEDAKLQFSKDSYEEDLGELLGKIGDDYADLFTSAKNLYDAILLSGILIVDDNSTKAPLSASMIKRYVEHQEDLEKLKEFIKANKSELYHDIFKDKNKNGYAGYIENGVKQDEFYKYLKNTLSKIAGSDYFLDKIEREDFLRKQRTFDNGSIPHQIHLQEMHAILRRQGDYYPFLKENQDRIEKILTFRIPYYVGPLARKDSRFSWAEYHSDEKITPWNFDKVIDKEKSAEKFITRMTLNDLYLPEEKVLPKHSHVYETYAVYNELTKIKYVNEQGKDSFFDSNMKQEIFDHVFKENRKVTKEKLLNYLNKEFPEYRIKDLIGLDKENKSFNASLGTYHDLKKILDKAFLDDKVNEEVIEDIIKTLTLFEDKDMIHERLQKYSDIFTADQLKKLERRHYTGWGRLSYKLINGIRNKENNKTILDYLIDDGSANRNFMQLINDDTLPFKQIIQKSQVVGDVDDIEAVVHDLPGSPAIKKGILQSVKIVDELVKVMGDNPDNIVIEMARENQTTNRGRSQSQQRLKKLQNSLKELGSNILNEEKPSYIEDKVENSHLQNDQLFLYYIQNGKDMYTGDELDIDHLSDYDIDHIIPQAFIKDDSIDNRVLTSSAKNRGKSDDVPSLDIVRARKAEWVRLYKSGLISKRKFDNLTKAERGGLTEADKAGFIKRQLVETRQITKHVAQILDARFNTESDENDKVIRDVKVITLKSNLVSQFRKDFEFYKVREINDYHHAHDAYLNAVVGTALLKKYPKLASEFVYGEYKKYDIRKFITNSSDKATAKYFFYSNLMNFFKRVIRYSNGKVIVRPVVEYSKDTEDIAWDKKSNFRTICKVLSYPQVNIVKKVETQTGGFSKESILPKGDSDKLIPRKTKKAYWDTKKYGGFDSPTVAYSVFVVADVEKGKAKKLKTVKELVGISIMERSFFEENPVEFLENKGYHNIREDKLIKLPKYSLFEFEGGKRRLLASASELQKGNEMVIPGHLVKLLYHAQRINSFNSTKYLDYVSAHKKEFEKVLSCVEDFANLYVDVEKNLSKIRAVADSMDNFSIEEISNSFINLLTLTALGAPADFNFLGEKIPRKRYTSTKECLNATLIHQSITGLYETRIDLSKIGEE

SEQ ID NO: 44 - protein, 1370 aa, Streptococcus agalactiae
MNKPYSIGLDIGTNSVGWSIITDDYKVPAKKIRVLGNTDKEYIKKNLIGALLFDGGNTAADRRLKRTARRRYTRRRNRILYLQEIFAEEMSKVDDSFFHRLEDSFLVEEDKRGSKYPIFATLQEEKYYHEKFPTIYHLRKELADKKEKADLRLVYLALAHIIKFRGHFLIEDDRFDVRNTDIQKQYQAFLEIFDTTFENNDLLSQDVDVEAILTDKISKSAKKDRILAQYPNQKSTGIFAEFLKLIVGNQADFKKHFNLEDKTPLQFAKDSYDEDLENLLGQIGDEFADLFSAAKKLYDSVLLSGILTVTDLSTKAPLSASMIQRYDEHREDLKQLKQFVKASLPEKYQEIVADSSKDGYAGYIEGKTNQEAFYKYLSKLLTKQEGSEYFLEKIKNEDFLRKQRTFDNGSIPHQVHLTELRAIIRRQSEYYPFLKENLDRIEKILTFRIPYYVGPLAREKSDFAWMTRKTDDSIRPWNFEDLVDKEKSAEAFIHRMTNNDLYLPEEKVLPKHSLIYEKFTVYNELTKVRFLAEGFKDFQFLNRKQKETIFNSLFKEKRKVTEKDIISFLNKVDGYEGIAIKGIEKQFNASLSTYHDLKKILGKDFLDNTDNELILEDIVQTLTLFEDREMIKKRLDIYKDFFTESQLKKLYRRHYTGWGRLSAKLINGIRNKENQKTILDYLIDDGSANRNFMQLIKDAGLSFKPIIDKARTGSHSDNLKEVIGELAGSPAIKKGILQSLKIVDELVKVMGYEPEQIVVEMARENQTTAKGLSRSRQRLTTLRESLANLKSNILEEKKPKYVKDQVENHHLSDDRLFLYYLQNGKDMYTDDELDIDNLSQYDIDHIIPQAFIKDDSIDNRVLVSSAKNRGKSDDVPSLEIVKDCKVFWKKLLDAKLMSQRKYDNLTKAERGGLTSDDKARFIQRQLVETRQITKHVARILDERFNNELDSKGRRIRKVKIVTLKSNLVSNFRKEFVFYKIREVNNYHHAHDAYLNAVVAKAILTKYPQLEPEFVYGDYPKYNSYKTRKSATEKLFFYSNIMNFFKTKVTLADGTVVVKDDIEVNNDTGEIVWDKKKHFATVRKVLSYPQVNIVKKTEIQTGGFSKESILAHGNSDKLIPRKTKDIYLDPKKYGGFDSPIVAYSVLVVADIKKGKAQKLKTVTELLGITIMERSRFEKNPSAFLESKGYLNIRTDKLIILPKYSLFELENGRRRLLASAGELQKGNELALPTQFMKFLYLASRYNESKGKPEEIEKKQEFVNQHVSYFDDIFQIINDFSKRVILADANLEKINRLYQDNKENIPVDELANNIINLFTFTSLGAPAAFKFFDKIVDRKRYTSTKEVLNSTLIHQSITGLYETRIDLGKLGED

SEQ ID NO: 45 - protein, 1378 aa, Streptococcus agalactiae
MNKPYSIGLDIGTNSVGWSIITDDYKVPAKKMRVLGNTDKEYIKKNLIGALLFDGGNTAADRRLKRTARRRYTRRRNRILYLQEIFAEEMSKVDDSFFHRLEDSFLVEEDKRGSKYPIFATLQEEKDYHEKFPTIYHLRKELADKQEKADLRLIYLALAHIIKFRGHFLIEDDRFDVRNTDIQKQYQAFLEIFDTTFENNHLLSQNVDVEAILTDKISKSAKKDRILAQYPNQKSTGIFAEFLKLIVGNQADFKKHFNLEDKTPLQFAKDSYDEDLENLLGQIGDEFADLFSAAKKLYDSVLLSGILTVIDLSTKAPLSASMIQRYDEHREDLKQLKQFVKASLPEKYQEIFADSSKDGYAGYIEGKTNQEAFYKYLSKLLTKQEDSENFLEKIKNEDFLRKQRTFDNGSIPHQVHLTELKAIIRRQSEYYPFLKENQDRIEKILTFRIPYYIGPLAREKSDFAWMTRKTDDSIRPWNFEDLVDKEKSAEAFIHRMTNNDFYLPEEKVLPKHSLIYEKFTVYNELTKVRYKNEQGETYFFDSNIKQEIFDGVFKEHRKVSKKKLLDFLAKEYEEFRIVDVIGLDKENKAFNASLGTYHDLEKILDKDFLDNPDNESILEDIVQTLTLFEDREMIKKRLENYKDLFTESQLKKLYRRHYTGWGRLSAKLINGIRDKESQKTILDYLIDDGRSNRNFMQLINDDGLSFKSIISKAQAGSHSDNLKEVVGELAGSPAIKKGILQSLKIVDELVKVMGYEPEQIVVEMARENQTTNQGRRNSRQRYKLLDDGVKNLASDLNGNILKEYPTDNQALQNERLFLYYLQNGRDMYTGEALDIDNLSQYDIDHIIPQAFIKDDSIDNRVLVSSAKNRGKSDDVPSLEIVKDCKVFWKKLLDAKLMSQRKYDNLTKAERGGLTSDDKARFIQRQLVETRQITKHVARILDERFNNELDSKGRRIRKVKIVTLKSNLVSNFRKEFGFYKIREVNDYHHAHDAYLNAVVAKAILTKYPQLEPEFVYGLYRRKKLSKIVREDKEEKYSEATRKMFFYSNLMNMFKRVVRLADGSIVVRPVIETGRYMGKTAWDKKKHFATVRKVLSYPQVNIVKKTEIQTGGFSKESILAHGNSDKLIPRKTKDIYLDPKKYGGFDSPIVAYSVLVVADIKKGKAQKLKTVTELLGITIMERSKFEKNPSAFLESKGYLNIRDDKLMILPKYSLFELENGRRRLLASAGELQKGNELALPTQFMKFLYLASRYNESKGKPEEIEKKQEFVNQHVSYFDDILQLINDFSKRVILADANLEKINKLYQDNKENISVDELANNIINLFTFTSLGAPAAFKFFDKIVDRKRYTSTKEVLNSTLIHQSITGLYETRIDLSKLGED

SEQ ID NO: 46 - protein, 1370 aa, Streptococcus agalactiae
MNKPYSIGLDIGTNSVGWSIITDDYKVPAKKMRVLGNTDKEYIKKNLIGALLFDGGNTAADRRLKRTARRRYTRRRNRILYLQEIFAEEMSKVDDSFFHRLEDSFLVEEDKRGSKYPIFATLQEEKDYHEKFSTIYHLRKELADKKEKADLRLIYIALAHIIKFRGHFLIEDDSFDVRNTDISKQYQDFLEIFNITFENNDLLSQNVDVEAILTDKISKSAKKDRILAQYPNQKSTGIFAEFLKLIVGNQADFKKYFNLEDKTPLQFAKDSYDEDLENLLGQIGDEFADLFSAAKKLYDSVLLSGILTVIDLSTKAPLSASMIQRYDEHREDLKQLKQFVKASLPEKYQEIFADSSKDGYAGYIEGKTNQEAFYKYLSKLLTKQEDSENFLEKIKNEDFLRKQRTFDNGSIPHQVHLTELKAIIRRQSEYYPFLKENQDRIEKILTFRIPYYIGPLAREKSDFAWMTRKTDDSIRPWNFEDLVDKEKSAEAFIHRMTNNDFYLPEEKVLPKHSLIYEKFTVYNELTKVRYKNEQGETYFFDSNIKQEIFDGVFKEHRKVSKKKLLDFLAKEYEEFRIVDVIGLDKENKAFNASLGTYHDLEKILDKDFLDNPDNESILEDIVQTLTLFEDREMIKKRLENYKDLFTESQLKKLYRRHYTGWGRLSAKLINGIRDKESQKTILDYLIDDGRSNRNFMQLINDDGLSFKSIISKAQAGSHSDNLKEVVGELAGSPAIKKGILQSLKIVDELVKVMGYEPEQIVVEMARENQTTNQGRRNSRQRYKLLDDGVKNLASDLNGNILKEYPTDNQALQNERLFLYYLQNGRDMYTGEALDIDNLSQYDIDHIIPQAFIKDDSIDNRVLVSSAKNRGKSDDVPSLEIVKDCKVFWKKLLDAKLMSQRKYDNLTKAERGGLTSDDKARFIQRQLVETRQITKHVARILDERFNNELDSKGRRIRKVKIVTLKSNLVSNFRKEFGFYKIREVNNYHHAHDAYLNAVVAKAILTKYPQLEPEFVYGDYPKYNSYKTRKSATEKLFFYSNIMNFFKTKVTLADGTVVVKDDIEVNNDTGEIVWDKKKHFATVRKVLSYPQNNIVKKTEIQTGGFSKESILAHGNSDKLIPRKTKDIYLDPKKYGGFDSPIVAYSVLVVADIKKGKAQKLKTVTELLGITIMERSRFEKNPSAFLESKGYLNIRADKLIILPKYSLFELENGRRRLLASAGELQKGNELALPTQFMKFLYLASRYNESKGKPEEIEKKQEFVNQHVSYFDDILQLINDFSKRVILADANLEKINKLYQDNKENISVDELANNIINLFTFTSLGAPAAFKFFDKIVDRKRYTSTKEVLNSTLIHQSITGLYETRIDLGKLGED

SEQ ID NO: 47 - protein, 1370 aa, Streptococcus agalactiae
MNKPYSIGLDIGTNSVGWSIITDDYKVPAKKMRVLGNTDKEYIKKNLIGALLFDGGNTAADRRLKRTARRRYTRRRNRILYLQEIFAEEMSKVDDSFFHRLEDSFLVEEDKRGSKYPIFATLQEEKDYHEKFSTIYHLRKELADKKEKADLRLIYIALAHIIKFRGHFLIEDDSFDVRNTDISKQYQDFLEIFNTIFENNDLLSQNVDVEAILTDKISKSAKKDRILAQYPNQKSTGIFAEFLKLIVGNQADFKKYFNLEDKTPLQFAKDSYDEDLENLLGQIGDEFADLFSAAKKLYDSVLLSGILTVIDLSTKAPLSASMIQRYDEHREDLKQLKQFVKASLPEKYQEIFADSSKDGYAGYIEGKTNQEAFYKYLSKLLTKQEDSENFLEKIKNEDFLRKQRTFDNGSIPHQVHLTELKAIIRRQSEYYPFLKENQDRIEKILTFRIPYYIGPLAREKSDFAWMTRKTDDSIRPWNFEDLVDKEKSAEAFIHRMTNNDFYLPEEKVLPKHSLIYEKFTVYNELTKVRYKNEQGETYFFDSNIKQEIFDGVFKEHRKVSKKKLLDFLAKEYEEFRIVDVIGLDKENKAFNASLGTYHDLEKILDKDFLDNPDNESILEDIVQTLTLFEDREMIKKRLENYKDLFTESQLKKLYRRHYTGWGRLSAKLINGIRDKESQKTILDYLIDDGRSNRNFMQLINDDGLSFKSIISKAQAGSHSDNLKEVVGELAGSPAIKKGILQSLKIVDELVKVMGYEPEQIVVEMARENQTTNQGRRNSRQRYKLLDDGVKNLASDLNGNILKEYPTDNQALQNERLFLYYLQNGRDMYTGEALDIDNLSQYDIDHIIPQAFIKDDSIDNRVLVSSAKNRGKSDDVPSLEIVKDCKVFWKKLLDAKLMSQRKYDNLTKAERGGLTSDDKARFIQRQLVETRQITKHVARILDERFNNELDSKGRRIRKVKIVTLKSNLVSNFRKEFGFYKIREVNNYHHAHDAYLNAVVAKAILTKYPQLEPEFVYGDYPKYNSYKTRKSATEKLFFYSNIMNFFKTKVTLADGTVVVKDDIEVNNDTGEIVWDKKKHFATVRKVLSYPQNNIVKKTEIQTGGFSKESILAHGNSDKLIPRKTKDIYLDPKKYGGFDSPIVAYSVLVVADIKKGKAQKLKTVTELLGITIMERSRFEKNPSAFLESKGYLNIRADKLIILPKYSLFELENGRRRLLASAGELQKGNELALPTQFMKFLYLASRYNESKGKPEEIEKKQEFVNQHVSYFDDILQLINDFSKRVILADANLEKINKLYQDNKENISVDELANNIINLFTFTSLGAPAAFKFFDKIVDRKRYTSTKEVLNSTLIHQSITGLYETRIDLGKLGED

SEQ ID NO: 48 - protein, 1370 aa, Streptococcus agalactiae
MNKPYSIGLDIGTNSVGWSIITDDYKVPAKKMRVLGNTDKEYIKKNLIGALLFDGGNTAADRRLKRTARRRYTRRRNRILYLQEIFAEEMSKVDDSFFHRLEDSFLVEEDKRGSKYPIFATLQEEKDYHEKFSTIYHLRKELADKKEKADLRLIYIALAHIIKFRGHFLIEDDSFDVRNTDISKQYQDFLEIFNTTFENNDLLSQNVDVEAILTDKISKSAKKDRILAQYPNQKSTGIFAEFLKLIVGNQADFKKYFNLEDKTPLQFAKDSYDEDLENLLGQIGDEFADLFSAAKKLYDSVLLSGILTVIDLSTKAPLSASMIQRYDEHREDLKQLKQFVKASLPEKYQEIFADSSKDGYAGYIEGKTNQEAFYKYLSKLLTKQEDSENFLEKIKNEDFLRKQRTFDNGSIPHQVHLTELKAIIRRQSEYYPFLKENQDRIEKILTFRIPYYIGPLAREKSDFAWMTRKTDDSIRPWNFEDLVDKEKSAEAFIHRMTNNDFYLPEEKVLPKHSLIYEKFTVYNELTKVRYKNEQGETYFFDSNIKQEIFDGVFKEHRKVSKKKLLDFLAKEYEEFRIVDVIGLDKENKAFNASLGTYHDLEKILDKDFLDNPDNESILEDIIQTLTLFEDREMIKKRLENYKDLFTESQLKKLYRRHYTGWGRLSAKLINGIRDKESQKTILDYLIDDGRSNRNFMQLINDDGLSFKSIISKAQAGSHSDNLKEVVGELAGSPAIKKGILQSLKIVDELVKVMGYEPEQIVVEMARENQTTNQGRRNSRQRYKLLDDGVKNLASDLNGNILKEYPTDNQALQNERLFLYYLQNGRDMYTGEALDIDNLSQYDIDHIIPQAFIKDDSIDNRVLVSSAKNRGKSDDVPSLEIVKDCKVFWKKLLDAKLMSQRKYDNLTKAERGGLTSDDKARFIQRQLVETRQITKHVARILDERFNNELDSKGRRIRKVKIVTLKSNLVSNFRKEFGFYKIREVNNYHHAHDAYLNAVVAKAILTKYPQLEPEFVYGDYPKYNSYKTRKSATEKLFFYSNIMNFFKTKVTLADGTVVVKDDIEVNNDTGEIVWDKKKHFATVRKVLSYPQNNIVKKTEIQTGGFSKESILAHGNSDKLIPRKTKDIYLDPKKYGGFDSPIVAYSVLVVADIKKGKAQKLKTVTELLGITIMERSRFEKNPSAFLESKGYLNIRADKLIILPKYSLFELENGRRRLLASAGELQKGNELALPTQFMKFLYLASRYNESKGKPEEIEKKQEFVNQHVSYFDDILQLINDFSKRVILADANLEKINKLYQDNKENISVDELANNIINLFTFTSLGAPAAFKFFDKIVDRKRYTSTKEVLNSTLIHQSITGLYETRIDLGKLGED

SEQ ID NO: 49 - protein, 1370 aa, Streptococcus agalactiae
MNKPYSIGLDIGTNSVGWSIITDDYKVPAKKMRVLGNTDKEYIKKNLIGALLFDGGNTAADRRLKRTARRRYTRRRNRILYLQEIFAEEMSKVDDSFFHRLEDSFLVEEDKRGSKYPIFATLQEEKDYHEKFSTIYHLRKELADKKEKADLRLIYIALAHIIKFRGHFLIEDDSFDVRNTDISKQYQDFLEIFNTTFENNDLLSQNVDVEAILTDKISKSAKKDRILAQYPNQKSTGIFAEFLKLIVGNQADFKKYFNLEDKTPLQFAKDSYDEDLENLLGQIGDEFADLFSAAKKLYDSVLLSGILTVIDLSTKAPLSASMIQRYDEHREDLKQLKQFVKASLPEKYQEIFADSSKDGYAGYIEGKTNQEAFYKYLSKLLTKQEDSENFLEKIKNEDFLRKQRTFDNGSIPHQVHLTELKAIIRRQSEYYPFLKENQDRIEKILTFRIPYYIGPLAREKSDFAWMTRKTDDSIRPWNFEDLVDKEKSAEAFIHRMTNNDFYLPEEKVLPKHSLIYEKFTVYNELTKVRYKNEQGETYFFDSNIKQEIFDGVFKEHRKVSKKKLLDFLAKEYEEFRIVDVIGLDKENKAFNASLGTYHDLEKILDKDFLDNPDNESILEDIVQTLTLFEDREMIKKRLENYKDLFTESQLKKLYRRHYTGWGRLSAKLINGIRDKESQKTILDYLIDDGRSNRNFMQLINDDGLSFKSIISKAQAGSHSDNLKEVVGELAGSPAIKKGILQSLKIVDELVKVMGYEPEQIVVEMARENQTTNQGRRNSRQRYKLLDDGVKNLASDLNGNILKEYPTDNQALQNERLFLYYLQNGRDMYTGEALDIDDLSQYDIDHIIPQAFIKDDSIDNRVLVSSAKNRGKSDDVPSLEIVKDCKVFWKKLLDAKLMSQRKYDNLTKAERGGLTSDDKARFIQRQLVETRQITKHVARILDERFNNELDSKGRRIRKVKIVTLKSNLVSNFRKEFGFYKIREVNNYHHAHDAYLNAVVAKAILTKYPQLEPEFVYGDYPKYNSYKTRKSATEKLFFYSNIMNFFKTKVTLADGTVVVKDDIEVNNDTGEIVWDKKKHFATVRKVLSYPQNNIVKKTEIQTGGFSKESILAHGNSDKLIPRKTKDIYLDPKKYGGFDSPIVAYSVLVVADIKKGKAQKLKTVTELLGITIMERSRFEKNPSAFLESKGYLNIRADKLIILPKYSLFELENGRRRLLASAGELQKGNELALPTQFMKFLYLASRYNESKGKPEEIEKKQEFVNQHVSYFDDILQLINDFSKRVILADANLEKINKLYQDNKENISVDELANNIINLFTFTSLGAPAAFKFFDKIVDRKRYTSTKEVLNSTLIHQSITGLYETRIDLGKLGED

SEQ ID NO: 50 - protein, 1370 aa, Streptococcus agalactiae
MNKPYSIGLDIGTNSVGWSIITDDYKVPAKKMRVLGNTDKEYIKKNLIGALLFDGGNTAADRRLKRTARRRYTRRRNRILYLQEIFAEEMSKVDDSFFHRLEDSFLVEEDKRGSKYPIFATLQEEKDYHEKFSTIYHLRKELADKKEKADLRLIYIALAHIIKFRGHFLIEDDSFDVRNTDISKQYQDFLEIFNTTFENNDLLSQNVDVEAILTDKISKSAKKDRILAQYPNQKSTGIFAEFLKLIVGNQADFKKYFNLEDKTPLQFAKDSYDEDLENLLGQIGDEFADLFSAAKKLYDSVLLSGILTVIDLSTKAPLSASMIQRYDEHREDLKQLKQFVKASLPEKYQEIFADSSKDGYAGYIEGKTNQEAFYKYLSKLLTKQEDSENFLEKIKNEDFLRKQRTFDNGSIPHQVHLTELKAIIRRQSEYYPFLKENQDRIEKILTFRIPYYIGPLAREKSDFAWMTRKTDDSIRPWNFEDLVDKEKSAEAFIHRMTNNDFYLPEEKVLPKHSLIYEKFTVYNELTKVRYKNEQGETYFFDSNIKQEIFDGVFKEHRKVSKKKLLDFLAKEYEEFRIVDVIGLDKENKAFNASLGTYHDLEKILDKDFLDNPDNESILEDIVQTLTLFEDREMIKKRLENYKDLFTESQLKKLYRRHYTGWGRLSAKLINGIRDKESQKTILDYLIDDGRSNRNFMQLINDDGLSFKSIISKAQAGSHSDNLKEVVGELAGSPAIKKGILQSLKIVDELVKVMGYEPEQIVVEMARENQTTNQGRRNSRQRYKLLDDGVKNLASDLNGNILKEYPTDNQALQNERLFLYYLQNGRDMYTGEALDIDNLSQYDIDHIIPQAFIKDDSIDNRVLVSSAKNRGKSDDVPSLEIVKDCKVFWKKLLDAKLMSQRKYDNLTKAERGGLTSDDKARFIQRQLVETRQITKHVARILDERFNNELDSKGRRIRKVKIVTLKSNLVSNFRKEFGFYKIREVNNYHHAHDAYLNAVVAKAILTKYPQLEPEFVYGDYPKYNSYKTRKSATEKLFFYSNIMNFFKTKVTLADGTVVVKDDIEVNNDTGEIVWDKKKHFATVRKVLSYPQNNIVKKTEIQTGGFSKESILAHGNSDKLIPRKTKDIYLDPKKYGGFDSPIVAYSVLVVADIKKGKAQKLKTVTELLGITIMERSRFEKNPSAFLESKGYLNIRADKLIILPKYSLFELENGRRRLLASAGELQKGNELALPTQFMKFLYLASRYNESKGKPEEIEKKQEFVNQHVSYFDDILQLINDFSKRVILADANLEKINKLYQDNKENISVDELANNIINLFTFTSLGAPAAFKFFDKIVDRKRYTSTKEVLNSTLIHQSITGLYETRIDLGKLGED

SEQ ID NO: 51 - protein, 1370 aa, Streptococcus agalactiae
MNKPYSIGLDIGTNSVGWSIITDDYKVPAKKMRVLGNTDKEYIKKNLIGALLFDGGNTAADRRLKRTARRRYTRRRNRILYLQEIFAEEMSKVDDSFFHRLEDSFLVEEDKRGSKYPIFATLQEEKDYHEKFSTIYHLRKELADKKEKADLRLIYIALAHIIKFRGHFLIEDDSFDVRNTDISKQYQDFLEIFNTTFENNDLLSQNVDVEAILTDKISKSAKKDRILAQYPNQKSTGIFAEFLKLIVGNQADFKKYFNLEDKTPLQFAKDSYDEDLENLLGQIGDEFADLFSAAKKLYDSVLLSGILTVIDLSTKAPLSASMIQRYDEHREDLKQLKQFVKASLPEKYQEIFADSSKDGYAGYIEGKTNQEAFYKYLSKLLTKQEDSENFLEKIKNEDFLRKQRTFDNGSIPHQVHLTELKAIIRRQSEYYPFLKENQDRIEKILTFRIPYYIGPLAREKSDFAWMTRKTDDSIRPWNFEDLVDKEKSAEAFIHRMTNNDFYLPEEKVLPKHSLIYEKFTVYNELTKVRYKNEQGETYFFDSNIKQEIFDGVFKEHRKVSKKKLLDFLAKEYEEFRIVDVIGLDKENKAFNASLGTYHDLEKILDKDFLDNPDNESILEDIVQTLTLFEDREMIKKRLENYKDLFTESQLKKLYRRHYTGWGRLSAKLINGIRDKESQKTILDYLIDDGRSNRNFMQLINDDGLSFKSIISKAQAGSHSDNLKEVVGELAGSPAIKKGILQSLKIVDELVKVMGYEPEQIVVEMARENQTTNQGRRNSRQRYKLLDDGVKNLASDLNGNILKEYPTDNQALQNERLFLYYLQNGRDMYTGEALDIDNLSQYDIDHIIPQAFIKDDSIDNRVLVSSAKNRGKSDDVPSLEIVKDCKVFWKKLLDAKLMSQRKYDNLTKAERGGLTSDDKARFIQRQLVETRQITKHVARILDERFNNELDSKGRRIRKVKIVTLKSNLVSNFRKEFGFYKIREVNNYHHAHDAYLNAVVAKAILTKYPQLEPEFVYGDYPKYNSYKTRKSATEKLFFYSNIMNFFKTKVTLADGTVVVKDDIEVNNDTGEIVWDKKKHFATVRKVLSYPQNNIVKKTEIQTGGFSKESILAHGNSDKLIPRKTKDIYLDPKKYGGFDSPIVAYSVLVVADIKKGKAQKLKTVTELLGITIMERSRFEKNPSAFLESKGYLNIRADKLIILPKYSLFELENGRRRLLASAGELQKGNELALPTQFMKFLYLASRYNESKGKPEEIEKKQEFVNQHVSYFDDILQLINDFSKRVILADANLEKINKLYQDNKENISVDELANNIINLFTFTSLGAPAAFKFFDKIVDRKRYTSTKEVLNSTLIHQSITGLYETRIDLGKLGGD

SEQ ID NO: 52 - protein, 1370 aa, Streptococcus agalactiae
MNKPYSIGLDIGTNSVGWSIITDDYKVPAKKMRVLGNTDKEYIKKNLIGALLFDGGNTAADRRLKRTARRRYTRRRNRILYLQEIFAEEMSKVDDSFFHRLEDSFLVEEDKRGSKYPIFATLQEEKDYHEKFSTIYHLRKELADKKEKADLRLIYIALAHIIKFRGHFLIEDDSFDVRNTDISKQYQDFLEIFNTTFENNDLLSQNVDVEAILTDKISKSAKKDRILAQYPNQKSTGIFAEFLKLIVGNQADFKKYFNLEDKTPLQFAKDSYDEDLENLLGQIGDEFADLFSAAKKLYDSVLLSGILTVIDLSTKAPLSASMIQRYDEHREDLKQLKQFVKASLPEKYQEIFADSSKDGYAGYIEGKTNQEAFYKYLSKLLTKQEDSENFLEKIKNEDFLRKQRTFDNGSIPHQVHLTELKAIIRRQSEYYPFLKENQDRIEKILTFRIPYYIGPLAREKSDFAWMTRKTDDSIRPWNFEDLVDKEKSAEAFIHRMTNNDFYLPEEKVLPKHSLIYEKFTVYNELTKVRYKNEQGETYFFDSNIKQEIFDGVFKEHRKVSKKKLLDFLAKEYEEFRIVDVIGLDKENKAFNASLGTYHDLEKILDKDFLDNPDNESILEDIVQTLTLFEDREMIKKRLENYKDLFTESQLKKLYRRHYTGWGRLSAKLINGIRDKESQKTILDYLIDDGRSNRNFMQLINDDGLSFKSIISKAQAGSHSDNLKEVVGELAGSPAIKKGILQSLKIVDELVKVMGYEPEQIVVEMARENQTTNQGRRNSRQRYKLLDDGVKNLASDLNGNILKEYPTDNQALQNERLFLYYLQNGRDMYTGEALDIDNLSQYDIDHIIPQAFIKDDSIDNRVLVSSAKNRGKSDDVPSLEIVKDCKVFWKKLLDAKLMSQRKYDNLTKAERGGLTSDDKARFIQRQLVETRQITKHVARILDERFNNELDSKGRRIRKVKIVTLKSNLVSNFRKEFGFYKIREVNNYHHAHDAYLNAVVAKAILTKYPQLEPEFVYGDYPKYNSYKTRKSATEKLFFYSNIMNFFKTKVTLADGTVVVKDDIEVNNDTGEIVWDKKKHFATVRKVLSYPQNNIVKKTEIQTGGFSKESILAHGNSDKLIPRKTKDIYLDPKKYGGFDSPIVAYSVLVVADIKKGKAQKLKTVTELLGITIMERSRFEKNPSAFLESKGYLNIRDDKLMILPKYSLFELENGRRRLLASAGELQKGNELALPTQFMKFLYLASRYNESKGKPEEIEKKQEFVNQHVSYFDDILQLINDFSKRVILADANLEKINKLYQDNKENISVDELANNIINLFTFTSLGAPAAFKFFDKIVDRKRYTSTKEVLNSTLIHQSITGLYETRIDLGKLGED

SEQ ID NO: 53 - protein, 1370 aa, Streptococcus agalactiae
MNKPYSIGLDIGTNSVGWSIITDDYKVPAKKMRVLGNTDKEYIKKNLIGALLFDGGNTAADRRLKRTARRRYTRRRNRILYLQEIFAEEMSKVDDSFFHRLEDSFLVEEDKRGSKYPIFATLQEEKDYHEKFSTIYHLRKELADKKEKADLRLIYIALAHIIKFRGHFLIEDDSFDVRNTDISKQYQDFLEIFNTTFENNDLLSQNVDVEAILTDKISKSAKKDRILAQYPNQKSTGIFAEFLKLIVGNQADFKKYFNLEDKTPLQFAKDSYDEDLENLLGQIGDEFADLFSAAKKLYDSVLLSGILTVIDLSTKAPLSASMIQRYDEHREDLKQLKQFVKASLPEKYQEIFADSSKDGYAGYIEGKTNQEAFYKYLSKLLTKQEDSENFLEKIKNEDFLRKQRTFDNGSIPHQVHLTELKAIIRRQSEYYPFLKENQDRIEKILTFRIPYYIGPLAREKSDFAWMTRKTDDSIRPWNFEDLVDKEKSAEAFIHRMTNNDFYLPEEKVLPKHSLIYEKFTVYNELTKVRYKNEQGETYFFDSNIKQEIFDGVFKEHRKVSKKKLLDFLAKEYEEFRIVDVIGLDKENKAFNASLGTYHDLEKILDKDFLDNPDNESILEDIVQTLTLFEDREMIKKRLENYKDLFTESQLKKLYRRHYTGWGRLSAKLINGIRDKESQKTILDYLIDDGRSNRNFMQLINDDGLSFKSIISKAQAGSHSDNLKEVVGELAGSPAIKKGILQSLKIVDELVKVVGYEPEQIVVEMARENQTTNQGRRNSRQRYKLLDDGVKNLASDLNGNILKEYPTDNQALQNERLFLYYLQNGRDMYTGEALDIDNLSQYDIDHIIPQAFIKDDSIDNRVLVSSAKNRGKSDDVPSLEIVKDCKVFWKKLLDAKLMSQRKYDNLTKAERGGLTSDDKARFIQRQLVETRQITKHVARILDERFNNELDSKGRRIRKVKIVTLKSNLVSNFRKEFGFYKIREVNNYHHAHDAYLNAVVAKAILTKYPQLEPEFVYGDYPKYNSYKTRKSATEKLFFYSNIMNFFKTKVTLADGTVVVKDDIEVNNDTGEIVWDKKKHFATVRKVLSYPQNNIVKKTEIQTGGFSKESILAHGNSDKLIPRKTKDIYLDPKKYGGFDSPIVAYSVLVVADIKKGKAQKLKTVTELLGITIMERSRFEKNPSAFLESKGYLNIRADKLIILPKYSLFELENGRRRLLASAGELQKGNELALPTQFMKFLYLASRYNESKGKPEEIEKKQEFVNQHVSYFDDILQLINDFSKRVILADANLEKINKLYQDNKENISVDELANNIINLFTFTSLGAPAAFKFFDKIVDRKRYTSTKEVLNSTLIHQSITGLYETRIDLGKLGED

SEQ ID NO: 54 - protein, 1370 aa, Streptococcus agalactiae
MNKPYSIGLDIGTNSVGWSIITDDYKVPAKKMRVLGNTDKEYIKKNLIGALLFDGGNTAADRRLKRTARRRYTRRRNRILYLQEIFAEEMSKVDDSFFHRLEDSFLVEEDKRGSKYPIFATLQEEKDYHEKFSTIYHLRKELADKKEKADLRLIYIALAHIIKFRGHFLIEDDSFDVRNTDISKQYQDFLEIFNTTFENNDLLSQNVDVEAILTDKISKSAKKDRILAQYPNQKSTGIFAEFLKLIVGNQADFKKYFNLEDKTPLQFAKDSYDEDLENLLRQIGDEFADLFSAAKKLYDSVLLSGILTVIDLSTKAPLSASMIQRYDEHREDLKQLKQFVKASLPEKYQEIFADSSKDGYAGYIEGKTNQEAFYKYLSKLLTKQEDSENFLEKIKNEDFLRKQRTFDNGSIPHQVHLTELKAIIRRQSEYYPFLKENQDRIEKILTFRIPYYIGPLAREKSDFAWMTRKTDDSIRPWNFEDLVDKEKSAEAFIHRMTNNDFYLPEEKVLPKHSLIYEKFTVYNELTKVRYKNEQGETYFFDSNIKQEIFDGVFKEHRKVSKKKLLDFLAKEYEEFRIVDVIGLDKENKAFNASLGTYHDLEKILDKDFLDNPDNESILEDIVQTLTLFEDREMIKKRLENYKDLFTESQLKKLYRRHYTGWGRLSAKLINGIRDKESQKTILDYLIDDGRSNRNFMQLINDDGLSFKSIISKAQAGSHSDNLKEVVGELAGSPAIKKGILQSLKIVDELVKVMGYEPEQIVVEMARENQTTNQGRRNSRQRYKLLDDGVKNLASDLNGNILKEYPTDNQALQNERLFLYYLQNGRDMYTGEALDIDNLSQYDIDHIIPQAFIKDDSIDNRVLVSSAKNRGKSDDVPSLEIVKDCKVFWKKLLDAKLMSQRKYDNLTKAERGGLTSDDKARFIQRQLVETRQITKHVARILDERFNNELDSKGRRIRKVKIVTLKSNLVSNFRKEFGFYKIREVNNYHHAHDAYLNAVVAKAILTKYPQLEPEFVYGDYPKYNSYKTRKSATEKLFFYSNIMNFFKTKVTLADGTVVVKDDIEVNNDTGEIVWDKKKHFATVRKVLSYPQNNIVKKTEIQTGGFSKESILAHGNSDKLIPRKTKDIYLDPKKYGGFDSPIVAYSVLVVADIKKGKAQKLKTVTELLGITIMERSRFEKNPSAFLESKGYLNIRADKLIILPKYSLFELENGRRRLLASAGELQKGNELALPTQFMKFLYLASRYNESKGKPEEIEKKQEFVNQHVSYFDDILQLINDFSKRVILADANLEKINKLYQDNKENISVDELANNIINLFTFTSLGAPAAFKFFDKIVDRKRYTSTKEVLNSTLIHQSITGLYETRIDLGKLGED

SEQ ID NO: 55 - protein, 1370 aa, Streptococcus agalactiae
MNKPYSIGLDIGTNSVGWSIITDDYKVPAKKMRVLGNTDKEYIKKNLIGALLFDGGNTAADRRLKRTARRRYTRRRNRILYLQEIFAEEMSKVDDSFFHRLEDSFLVEEDKRGSKYPIFATMQEEKDYHEKFPTIYHLRKELADKKEKADLRLVYLALAHIIKFRGHFLIEDDRFDVRNTDIQKQYQAFLEIFDTSFENNHLLSQNVDVEAILTDKISKSAKKDRILAQYPNQKSTGIFAEFLKLIVGNQADFKKHFNLEDKTPLQFAKDSYDEDLENLLGQIGDEFADLFSAAKKLYDSVLLSGILTVTDLSTKAPLSAYMIQRYDEHREDLKQLKQFVKASLPEKYQEIFADSSKDGYAGYIEGKTNQEAFYKYLSKLLTKQEDSEYFLEKIKNEDFLRKQRTFDNGSIPHQVHLTELKAIIRRQSEYYPFLKENQDKIEKILTFRIPYYVGPLARGNSDFAWMTRKTDDSIRPWNFEDLVDKEKSAEAFIHRMTNNDLYLPEEKVLPKHSLIYEKFTVYNELTKVRYKNEQGETYFFDSNVKQEIFDGVFKEHRKVSKKQLLDFLAKEFEEFRIVDVTGLDKENKAFNASLGTYHDLKKILDKDFLDNPDNESILEDIVQTITLFEDREMIKKRLENYKDLFTESQLKKLYRRHYTGWGRLSAKLINGIRDRESQKTILDYLISDGRANRNFMQLINDDGLSFKSIISKAQSGSHSDNLKEVVGELAGSPAIKKGILQSLKIVDELVKVMGYEPEQIVVEMARENQTTNQGRRNSRQRYKLLEDGVKNLASDLNGDILKEYPTDNQALQNERLFLYYLQNGRDMYTGEALDIDNLSQYDIDHIVPQAFIKDDSIDNRVLVSSAKNRGKSDDVPSIDIVKARKAFWKKLLDAKLISQRKYDNLTKAERGGLTPDDKAGFIQRQLVETRQITKHVARILDERFNNKVDDNNKPIRKVKIVTLKSNLVSNFRKEFGFYKIREVNNYHHAHDAYLNAVVAKAILTKYPQLEPEFVYGDYPKYNSYKTRKSATEKLFFYSNIMNFFKTKVTLADETVVVKDDIEVNNETGEIAWDKKKHFATVRKVLSYPQVNIVKKTEVQTGGFSKESILAHSNSDKLIPRKTKDIYLDPKKYGGFDSPIVAYSVLVLADIKKGKAQKLKTVKELIGITIMERERFEKNPSAFLESKGYLNIRTDKLIILPKYSLFELENGRRRLLASAGELQKGNELALPTQYMKFLYLASRYNESKGKPEEIEKKQEFVNQHISYFDDILQLINDFSKRVILADANLEKINKLYSDNKDNTPVDELAKNIINLFTFTSLGAPAAFKFFDKSVDRKRYTSTKEVLDSTLIHQSITGLYETRIDLGKLGED

SEQ ID NO: 56 - protein, 1370 aa, Streptococcus agalactiae
MNKPYSIGLDIGTNSVGWSIITDDYKVPAKKMRVLGNTDKEYIKKNLIGALLFDGGNTAADRRLKRTARRRYTRRRNRILYLQEIFAEEMSKVDDSFFHRLEDSFLVEEDKRGSKYPIFATMQEEKYYHEKFPTIYHLRKELADKKEKADLRLIYLALAHIIKFRGHFLIEDDRFDVRNTDIQKQYQAFLEIFDTTFENNDLLSQNVDVEAILTDKISKSAKKDRILARYPNQKSTGIFAEFLKLIVGNQADFKKHFNLEDKTPLQFAKDSYDEDLENLLGQIGDEFADLFSAAKKLYDSVLLSGILTVTDLSTKAPLSASMIQHYDEHREDLKQLKQFVKASLPEKYQEIFADSSKDGYAGYIEGKTNQEAFYKYLSKLLTKQEGSEYLLEKIKNEDFLRKQRTFDNGSIPHQVHLTELRAIIRRQSEYYPFLKENLDRIEKILTFRIPYYVGPLAREKSDFAWMTRKTDDSIRPWNFEDLVDKEKSAEAFIHRMTNNDLYLPEEKVLPKHSLIYEKFTVYNELTKVRFLAEGFKDFQFLNRKQKETIFNSLFKEKRKVTEKDIISFLNKVDGYEGIAIKGIEKQFNASLSTYHDLKKILGKDFLDNTDNELILEDIVQTLTLFEDREMIRKRLDIYKDFFTESQLKKLYRRHYTGWGRLSAKLINGIRNKENQKTILDYLIDDGSANRNFMQLIKDAGLSFKPIIDKARTGSHSDNLKEVVGELAGSPAIKKGILQSLKIVDELVKVMGYEPEQIVVEMARENQTTAKGLSRSRQRLTTLRESLANLKSNILEEKKPKYVKDQVENHHLSDDRLFLYYLQNGKDMYTDDELDIDNLSQYDIDHIIPQAFIKDDSIDNRVLVSSAKNRGKSDDVPSVEIVKDCKVFWKKLLDAKLMSQRKYDNLTKAERGGLTSDDKARFIQRQLVETRQITKHVARILDERFNNELDSKGRRIRKVKIVTLKSNLVSNFRKEFGFYKIREVNNYHHAHDAYLNAVVAKAILTKYPQLEPEFVYGDYPKYNSYKTRKSATEKLFFYSNIMNFFKTKVTLADGTVVVKDDIEVNNDTGEIVWDKKKHFATVRKVLSYPQVNIVKKTEIQTGGFSKESILAHGNSDKLIPRKTKDIYLDPKKYGGFDSPIVAYSVLVVADIKKGKAQKLKTVTELLGITIMERSRFEKNPSAFLESKGYLNIRDDKLMILPKYSLFELENGRRRLLASAGELQKGNELALPTQFMKFLYLASRYNELKGKPEEIEQKQEFVVQHVSYFDDILQIINDFSNRVILADANLEKINKLYQDNKENIPVDELANNIINLFTFTSLGAPAAFKFFDKIVDRKRYTSTKEVLNSTLIHQSITGLYETRIDLGKLGED

SEQ ID NO: 57 - protein, 1370 aa, Streptococcus agalactiae
MNKPYSIGLDIGTNSVGWSIITDDYKVPAKKMRVLGNTDKEYIKKNLIGALLFDGGNTAADRRLKRTARRRYTRRRNRILYLQEIFAEEMSKVDDSFFHRLEDSFLVEEDKRGSKYPIFATMQEEKYYHEKFPTIYHLRKELADKKEKADLRLIYLALAHIIKFRGHFLIEDDRFDVRNTDIQKQYQAFLEIFDTTFENNDLLSQNVDVEAILTDKISKSAKKDRILARYPNQKSTGIFAEFLKLIVGNQADFKKHFNLEDKTPLQFAKDSYDEDLENLLGQIGDEFADLFSAAKKLYDSVLLSGILTVTDLSTKAPLSASMIQRYDEHREDLKQLKQFVKASLPEKYQEIFADSSKDGYAGYIEGKTNQEAFYKYLSKLLTKQEGSEYLLEKIKNEDFLRKQRTFDNGSIPHQVHLTELRAIIRRQSEYYPFLKENLDRIEKILTFRIPYYVGPLAREKSDFAWMTRKTDDSIRPWNFEDLVDKEKSAEAFIHRMTNNDLYLPEEKVLPKHSLIYEKFTVYNELTKVRFLAEGFKDFQFLNRKQKETIFNSLFKEKRKVTEKDIISFLNKVDGYEGIAIKGIEKQFNASLSTYHDLKKILGKDFLDNTDNELILEDIVQTLTLFEDREMIRKRLDIYKDFFTESQLKKLYRRHYTGWERLSAKLINGIRNKENQKTILDYLIDDGSANRNFMQLIKDAGLSFKPIIDKARTGSHLDNLKEVVGELAGSPAIKKGILQSLKIVDELVKVMGYEPEQIVVEMARENQTTAKGLSRSRQRLTTLRESLANLKSNILEEKKPKYVKDQVENHHLSDDRLFLYYLQNGKDMYTDDELDIDNLSQYDIDHIIPQAFIKDDSIDNRVLVSSAKNRGKSDDVPSLEIVKDCKVFWKKLLDAKLMSQRKYDNLTKAERGGLTSDDKARFIQRQLVETRQITKHVARILDERFNNELDSKGRRIRKVKIVTLKSNLVSNFRKEFGFYKIREVNNYHHAHDAYLNAVVAKAILTKYPQLEPEFVYGDYPKYNSYKTRKSATEKLFFYSNIMNFFKTKVTLADGTVVVKDDIEVNNDTGEIVWDKKKHFATVRKVLSYPQVNIVKKTEVQTGGFSKESILAHGNSDKLIPRKTKDIYLDPKKYGGFDSPIVAYSVLVVADIKKGKAQKLKTVTELLGITIMERSRFEKNPSAFLESKGYLNIRTDKLIILPKYSLFELENGRRRLLASAGELQKGNELALPTQYMKFLYLASRYNELKGKPEEIEQKQEFVVQHVSYFDDILQIINDFSNRVILADANLEKINKLYQDNKENIPVDELANNIINLFTFTSLGAPAAFKFFDKIVDRKRYTSTKEVLNSTLIHQSITGLYETRIDLGKLGEG

SEQ ID NO: 58 - protein, 1370 aa, Streptococcus agalactiae
MNKPYSIGLDIGTNSVGWSIITDDYKVPAKKMRVLGNTDKEYIKKNLIGALLFDGGNTAADRRLKRTARRRYTRRRNRILYLQEIFAEEMSKVDDSFFHRLEDSFLVEEDKRGSKYPIFATMQEEKYYHEKFPTIYHLRKELADKKEKADLRLIYLALAHIIKFRGHFLIEDDRFDVRNTDIQKQYQAFLEIFDTTFENNDLLSQNVDVEAILTDKISKSAKKDRILARYPNQKSTGIFAEFLKLIVGNQADFKKHFNLEDKTPLQFAKDSYDEDLENLLGQIGDEFADLFSAAKKLYDSVLLSGILTVTDLSTKAPLSASMIQRYDEHREDLKQLKQFVKASLPEKYQEIFADSSKDGYAGYIEGKTNQEAFYKYLSKLLTKQEGSEYLLEKIKNEDFLRKQRTFDNGSIPHQVHLTELRAIIRRQSEYYPFLKENLDRIEKILTFRIPYYVGPLAREKSDFAWMTRKTDDSIRPWNFEDLVDKEKSAEAFIHRMTNNDLYLPEEKVLPKHSLIYEKFTVYNELTKVRFLAEGFKDFQFLNRKQKETIFNSLFKEKRKVTEKDIISFLNKVDGYEGIAIKGIEKQFNASLSTYHDLKKILGKDFLDNTDNELILEDIVQTLTLFEDREMIRKRLDIYKDFFTESQLKKLYRRHYTGWGRLSAKLINGIRNKENQKTILDYLIDDGSANRNFMQLIKDAGLSFKPIIDKARTGSHLDNLKEVVGELAGSPAIKKGILQSLKIVDELVKVMGYEPEQIVVEMARENQTTAKGLSRSRQRLTTLRESLANLKSNILEEKKPKYVKDQVENHHLSDDRLFLYYLQNGKDMYTDDELDIDNLSQYDIDHIIPQAFIKDDSIDNRVLVSSAKNRGKSDDVPSLEIVKDCKVFWKKLLDAKLMSQRKYDNLTKAERGGLTSDDKARFIQRQLVETRQITKHVARILDERFNNELDSKGRRIRKVKIVTLKSNLVSNFRKEFGFYKIREVNNYHHAHDAYLNAVVAKAILTKYPQLEPEFVYGDYPKYNSYKTRKSATEKLFFYSNIMNFFKTKVTLADGTVVVKDDIEVNNDTGEIVWDKKKHFATVRKVLSYPQVNIVKKTEVQTGGFSKESILAHGNSDKLIPRKTKDIYLDPKKYGGFDSPIVAYSVLVVADIKKGKAQKLKTVTELLGITIMERSRFEKNPSAFLESKGYLNIRTDKLIILPKYSLFELENGRRRLLASAGELQKGNELALPTQYMKFLYLASRYNELKGKPEEIEQKQEFVVQHVSYFDDILQIINDFSNRVILADANLEKINKLYQDNKENIPVDELANNIINLFTFTSLGAPAAFKFFDKIVDRKRYTSTKEVLNSTLIHQSITGLYETRIDLGKLGEG

SEQ ID NO: 59 - protein, 1370 aa, Streptococcus agalactiae
MNKPYSIGLDIGTNSVGWSIITDDYKVPAKKMRVLGNTDKEYIKKNLIGALLFDGGNTAADRRLKRTARRRYTRRRNRILYLQEIFAEEMSKVDDSFFHRLEDSFLVEEDKRGSKYPIFATMQEEKYYHEKFPTIYHLRKELADKKEKADLRLIYLALAHIIKFRGHFLIEDDRFDVRNTDIQKQYQAFLEIFDTTFENNDLLSQNVDVEAILTDKISKSAKKDRILARYPNQKSTGIFAEFLKLIVGNQADFKKHFNLEDKTPLQFAKDSYDEDLENLLGQIGDEFADLFSAAKKLYDSVLLSGILTVTDLSTKAPLSASMIQRYDEHREDLKQLKQFVKASLPEKYQEIFADSSKDGYAGYIEGKTNQEAFYKYLSKLLTKQEGSEYLLEKIKNEDFLRKQRTFDNGSIPHQVHLTELRAIIRRQSEYYPFLKENLDRIEKILTFRIPYYVGPLAREKSDFAWMTRKTDDSIRPWNFEDLVDKEKSAEAFIHRMTNNDLYLPEEKVLPKHSLIYEKFTVYNELTKVRFLAEGFKDFQFLNRKQKETIFNSLFKEKRKVTEKDIISFLNKVDGYEGIAIKGIEKQFNASLSTYHDLKKILGKDFLDNTDNELILEDIVQTLTLFEDREMIRKRLDIYKDFFTESQLKKLYRRHYTGWGRLSAKLINGIRNKENQKTILDYLIDDGSANRNFMQLIKDAGLSFKPIIDKARTGSHSDNLKEVVGELAGSPAIKKGILQSLKIVDELVKVMGYEPEQIVVEMARENQTTAKGLSRLRQRLTTLRESLANLKSNILEEKKPKYVKDQVENHHLSDDRLFLYYLQNGKDMYTDDELDIDNLSQYDIDHIIPQAFIKDDSIDNRVLVSSAKNRGKSDDVPSVEIVKDCKVFWKKLLDAKLMSQRKYDNLTKAERGGLTSDDKARFIQRQLVETRQITKHVARILDERFNNELDSKGRRIRKVKIVTLKSNLVSNFRKEFGFYKIREVNNYHHAHDAYLNAVVAKAILTKYPQLEPEFVYGDYPKYNSYKTRKSATEKLFFYSNIMNFFKTKVTLADGTVVVKDDIEVNNDTGEIVWDKKKHFATVRKVLSYPQVNIVKKTEIQTGGFSKESILAHGNSDKLIPRKTKDIYLDPKKYGGFDSPIVAYSVLVVADIKKGKAQKLKTVTELLGITIMERSRFEKNPSAFLESKGYLNIRDDKLMILPKYSLFELENGRRRLLASADELQKGNELALPTQFMKFLYLASRYNELKGKPEEIEQKQEFVVQHVSYFDDILQIINDFSNRVILADANLEKINKLYQDNKENIPVDELANNIINLFTFTSLGAPAAFKFFDKIVDRKRYTSTKEVLNSTLIHQSITGLYETRIDLGKLGED

SEQ ID NO: 60 - protein, 1370 aa, Streptococcus agalactiae
MNKPYSIGLDIGTNSVGWSIITDDYKVPAKKMRVLGNTDKEYIKKNLIGALLFDGGNTAADRRLKRTARRRYTRRRNRILYLQEIFAEEMSKVDDSFFHRLEDSFLVEEDKRGSKYPIFATMQEEKYYHEKFPTIYHLRKELADKKEKADLRLIYLALAHIIKFRGHFLIEDDRFDVRNTDIQKQYQAFLEIFDTTFENNDLLSQNVDVEAILTDKISKSAKKDRILARYPNQKSTGIFAEFLKLIVGNQADFKKHFNLEDKTPLQFAKDSYDEDLENLLGQIGDEFADLFSAAKKLYDSVLLSGILTVTDLSTKAPLSASMIQRYDEHREDLKQLKQFVKASLPEKYQEIFADSSKDGYAGYIEGKTNQEAFYKYLSKLLTKQEGSEYLLEKIKNEDFLRKQRTFDNGSIPHQVHLTELRAIIRRQSEYYPFLKENLDRIEKILTFRIPYYVGPLAREKSDFAWMTRKTDDSIRPWNFEDLVDKEKSAEAFIHRMTNNDLYLPEEKVLPKHSLIYEKFTVYNELTKVRFLAEGFKDFQFLNRKQKETIFNSLFKEKRKVTEKDIISFLNKVDGYEGIAIKGIEKQFNASLSTYHDLKKILGKDFLDNTDNELILEDIVQTLTLFEDREMIRKRLDIYKDFFTESQLKKLYRRHYTGWGRLSAKLINGIRNKENQKTILDYLIDDGSANRNFMQLIKDAGLSFKPIIDKARTGSHSDNLKEVVGELAGSPAIKKGILQSLKIVDELVKVMGYEPEQIVVEMARENQTTAKGLSRSRQRLTTLRESLANLKSNILEEKKPKYVKDQVENHHLSDDRLFLYYLQNGKDMYTDDELDIDNLSQYDIDHIIPQAFIKDDSIDNRVLVSSAKNRGKSDDVPSVEIVKDCKVFWKKLLDAKLMSQRKYDNLTKAERGGLTSDDKARFIQRQLVETRQITKHVARILDERFNNELDSKGRRIRKVKIVTLKSNLVSNFRKEFGFYKIREVNNYHHAHDAYLNAVVAKAILTKYPQLEPEFVYGDYPKYNSYKTRKSATEKLFFYSNIMNFFKTKVTLADGTVVVKDDIEVNNDTGEIVWDKKKHFATVRKVLSYPQVNIVKKTEIQTGGFSKESILAHGNSDKLIPRKTKDIYLDPKKYGGFDSPIVAYSVLVVADIKKGKAQKLKTVTELLGITIMERSRFEKNPSAFLESKGYLNIRDDKLMILPKYSLFELENGRRRLLASAGELQKGNELALPTQFMKFLYLASRYNELKGKPEEIEQKQEFVVQHVSYFDDILQIINDFSNRVILADANLEKINKLYQDNKENIPVDELANNIINLFTFTSLGAPAAFKFFDKIVDRKRYTSTKEVLNSTLIHQSITGLYETRIDLGKLGED

SEQ ID NO: 61 - protein, 1370 aa, Streptococcus agalactiae
MNKPYSIGLDIGTNSVGWSIITDDYKVPAKKMRVLGNTDKEYIKKNLIGALLFDGGNTAADRRLKRTARRRYTRRRNRILYLQEIFAEEMSKVDDSFFHRLEDSFLVEEDKRGSKYPIFATMQEEKYYHEKFPTIYHLRKELADKKEKADLRLIYLALAHIIKFRGHFLIEDDRFDVRNTDIQKQYQAFLEIFDTTFENNDLLSQNVDVEAILTDKISKSAKKDRILARYPNQKSTGIFAEFLKLIVGNQADFKKHFNLEDKTPLQFAKDSYDEDLENLLGQIGDEFADLFSAAKKLYDSVLLSGILTVTDLSTKAPLSASMIQRYDEHREDLKQLKQFVKASLPEKYQEIFADSSKDGYAGYIEGKTNQEAFYKYLSKLLTKQEGSEYLLEKIKNEDFLRKQRTFDNGSIPHQVHLTELRAIIRRQSEYYPFLKENLDRIEKILTFRIPYYVGPLAREKSDFAWMTRKTDDSIRPWNFEDLVDKEKSAEAFIHRMTNNDLYLPEEKVLPKHSLIYEKFTVYNELTKVRFLAEGFKDFQFLNRKQKETIFNSLFKEKRKVTEKDIISFLNKVDGYEGIAIKGIEKQFNASLSTYHDLKKILGKDFLDNTDNELILEDIVQTLTLFEDREMIRKRLDIYKDFFTESQLKKLYRRHYTGWGRLSAKLINGIRNKENQKTILDYLIDDGSANRNFMQLIKDAGLSFKPIIDKARTGSHSDNLKEVVGELAGSPAIKKGILQSLKIVDELVKVMGYEPEQIVVEMARENQTTAKGLSRSRQRLTTLRESLANLKSNILEEKKPKYVKDQVENHHLSDDRLFLYYLQNGKDMYTDDELDIDNLSQYDIDHIIPQAFIKDDSIDNRVLVSSAKNRGKSDDVPSVEIVKDCKVFWKKLLDAKLMSQRKYDNLTKAERGGLTSDDKARFIQRQLVETRQITKHVARILDERFNNELDSKGRRIRKVKIVTLKSNLVSNFRKEFGFYKIREVNNYHHAHDAYLNAVVAKAILTKYPQLEPEFVYGDYPKYNSYKTRKSATEKLFFYSNIMNFFKTKVTLADGTVVVKDDIEVNNDTGEIVWDKKKHFATVRKVLSYPQVNIVKKTEIQTGGFSKESILAHGNSDKLIPRKTKDIYLDPKKYGGFDSPKVAYSVLVVADIKKGKAQKLKTVTELLGITIMERSRFEKNPSAFLESKGYLNIRDDKLMILPKYSLFELENGRRRLLASAGELQKGNELALPTQFMKFLYLASRYNELKGKPEEIEQKQEFVVQHVSYFDDILQIINDFSNRVILADANLEKINKLYQDNKENIPVDELANNIINLFTFTSLGAPAAFKFFDKIVDRKRYTSTKEVLNSTLIHKSITGLYETRIDLGKLGED

SEQ ID NO: 62 - protein, 1370 aa, Streptococcus agalactiae
MNKPYSIGLDIGTNSVGWSIITDDYKVPAKKMRVLGNTDKEYIKKNLIGALLFDGGNTAADRRLKRTARRRYTRRRNRILYLQEIFAEEMSKVDDSFFHRLEDSFLVEEDKRGSKYPIFATMQEEKYYHEKFPTIYHLRKELADKKEKADLRLIYLALAHIIKFRGHFLIEDDRFDVRNTDIQKQYQAFLEIFDTTFENNDLLSQNVDVEAILTDKISKSAKKDRILARYPNQKSTGIFAEFLKLIVGNQADFKKHFNLEDKTPLQFAKDSYDEDLENLLGQIGDEFADLFSAAKKLYDSVLLSGILTVTDLSTKAPLSASMIQRYDEHREDLKQLKQFVKASLPEKYQEIFADSSKDGYAGYIEGKTNQEAFYKYLSKLLTKQEGSEYLLEKIKNEDFLRKQRTFDNGSIPHQVHLTELRAIIRRQSEYYPLLKENLDRIEKILTFRIPYYVGPLAREKSDFAWMTRKTDDSIRPWNFEDLVDKEKSAEAFIHRMTNNDLYLPEEKVLPKHSLIYEKFTVYNELTKVRFLAEGFKDFQFLNRKQKETIFNSLFKEKRKVTEKDIISFLNKVDGYEGIAIKGIEKQFNASLSTYHDLKKILGKDFLDNTDNELILEDIVQTLTLFEDREMIRKRLDIYKDFFTESQLKKLYRRHYTGWGRLSAKLINGIRNKENQKTILDYLIDDGSANRNFMQLIKDAGLSFKPIIDKARTGSHSDNLKEVVGELAGSPAIKKGILQSLKIVDELVKVMGYEPEQIVVEMARENQTTAKGLSRSRQRLTTLRESLANLKSNILEEKKPKYVKDQVENHHLSDDRLFLYYLQNGKDMYTDDELDIDNLSQYDIDHIIPQAFIKDDSIDNRVLVSSAKNRGKSDDVPSVEIVKDCKVFWKKLLDAKLMSQRKYDNLTKAERGGLTSDDKARFIQRQLVETRQITKHVARILDERFNNELDSKGRRIRKVKIVTLKSNLVSNFRKEFGFYKIREVNNYHHAHDAYLNAVVAKAILTKYPQLEPEFVYGDYPKYNSYKTRKSATEKLFFYSNIMNFFKTKVTLADGTVVVKDDIEVNNDTGEIVWDKKKHFATVRKVLSYPQVNIVKKTEIQTGGFSKESILAHGNSDKLIPRKTKDIYLDPKKYGGFDSPIVAYSVLVVADIKKGKAQKLKTVTELLGITIMERSRFEKNPSAFLESKGYLDIRDDKLMILPKYSLFELENGRRRLLASAGELQKGNELALPTQFMKFLYLASRYNELKGKPEEIEQKQEFVVQHVSYFDDILQIINDFSNRVILADANLEKINKLYQDNKENIPVDELANNIINLFTFTSLGAPAAFKFFDKIVDRKRYTSTKEVLNSTLIHQSITGLYETRIDLGKLGED

SEQ ID NO: 63 - protein, 1370 aa, Streptococcus agalactiae
  misc_feature (117)..(117): Xaa can be any naturally occurring amino acid
MNKPYSIGLDIGTNSVGWSIITDDYKVPAKKMRVLGNTDKEYIKKNLIGALLFDGGNTAADRRLKRTARRRYTRRRNRILYLQEIFAEEMSKVDDSFFHRLEDSFLVEEDKRGSKYXIFATLQEEKDYHEKFSTIYHLRKELADKKEKADLRLIYIALAHIIKFRGHFLIEDDSFDVRNTDISKQYQDFLEIFNTTFENNDLLSQNVDVEAILTDKISKSAKKDRILAQYPNQKSTGIFAEFLKLIVGNQADFKKYFNLEDKTPLQFAKDSYDEDLENLLGQIGDEFADLFSAAKKLYDSVLLSGILTVIDLSTKAPLSASMIQRYDEHREDLKQLKQFVKASLPEKYQEIFADSSKDGYAGYIEGKTNQEAFYKYLSKLLTKQEDSENFLEKIKNEDFLRKQRTFDNGSIPHQVHLTELKAIIRRQSEYYPFLKENQDRIEKILTFRIPYYIGPLAREKSDFAWMTRKTDDSIRPWNFEDLVDKEKSAEAFIHRMTNNDFYLPEEKVLPKHSLIYEKFTVYNELTKVRYKNEQGETYFFDSNIKQEIFDGVFKEHRKVSKKKLLDFLAKEYEEFRIVDVIGLDKENKAFNASLGTYHDLEKILDKDFLDNPDNESILEDIVQTLTLFEDREMIKKRLENYKDLFTESQLKKLYRRHYTGWGRLSAKLINGIRDKESQKTILDYLIDDGRSNRNFMQLINDDGLSFKSIISKAQAGSHSDNLKEVVGELAGSPAIKKGILQSLKIVDELVKVMGYEPEQIVVEMARENQTTNQGRRNSRQRYKLLDDGVKNLASDLNGNILKEYPTDNQALQNERLFLYYLQNGRDMYTGEALDIDNLSQYDIDHIIPQAFIKDDSIDNRVLVSSAKNRGKSDDVPSLEIVKDCKVFWKKLLDAKLMSQRKYDNLTKAERGGLTSDDKARFIQRQLVETRQITKHVARILDERFNNELDSKGRRIRKVKIVTLKSNLVSNFRKEFGFYKIREVNNYHHAHDAYLNAVVAKAILTKYPQLEPEFVYGDYPKYNSYKTRKSATEKLFFYSNIMNFFKTKVTLADGTVVVKDDIEVNNDTGEIVWDKKKHFATVRKVLSYPQNNIVKKTEIQTGGFSKESILAHGNSDKLIPRKTKDIYLDPKKYGGFDSPIVAYSVLVVADIKKGKAQKLKTVTELLGITIMERSRFEKNPSAFLESKGYLNIRADKLIILPKYSLFELENGRRRLLASAGELQKGNELALPTQFMKFLYLASRYNESKGKPEEIEKKQEFVNQHVSYFDDILQLINDFSKRVILADANLEKINKLYQDNKENISVDELANNIINLFTFTSLGAPAAFKFFDKIVDRKRYTSTKEVLNSTLIHQSITGLYETRIDLGKLGED

SEQ ID NO: 64 - protein, 1370 aa, Streptococcus agalactiae
MNKPYSIGLDIGTNSVGWSIITDDYKVPAKKMRVLGNTDKEYIKKNLIGALLFDGGNTAADRRLKRTSRRRYTRRRNRILYLQEIFAEEMSKVDDSFFHRLEDSFLVEEDKRGSKYPIFATLQEEKDYHEKFSTIYHLRKELADKKEKADLRLIYIALAHIIKFRGHFLIEDDSFDVRNTDISKQYQDFLEIFNTTFENNDLLSQNVDVEAILTDKISKSAKKDRILAQYPNQKSTGIFAEFLKLIVGNQADFKKYFNLEDKTPLQFAKDSYDEDLENLLGQIGDEFADLFSAAKKLYDSVLLSGILTVIDLSTKAPLSASMIQRYDEHREDLKQLKQFVKASLPEKYQEIFADSSKDGYAGYIEGKTNQEAFYKYLSKLLTKQEDSENFLEKIKNEDFLRKQRTFDNGSIPHQVHLTELKAIIRRQSEYYPFLKENQDRIEKILTFRIPYYIGPLAREKSDFAWMTRKTDDSIRPWNFEDLVDKEKSAEAFIHRMTNNDFYLPEEKVLPKHSLIYEKFTVYNELTKVRYKNEQGETYFFDSNIKQEIFDGVFKEHRKVSKKKLLDFLAKEYEEFRIVDVIGLDKENKAFNASLGTYHDLEKILDKDFLDNPDNESILEDIVQTLTLFEDREMIKKRLENYKDLFTESQLKKLYRRHYTGWGRLSAKLINGIRDKESQKTILDYLIDDGRSNRNFMQLINDDGLSFKSIISKAQAGSHSDNLKEVVGELAGSPAIKKGILQSLKIVDELVKVMGYEPEQIVVEMARENQTTNQGRRNSRQRYKLLDDGVKNLASDLNGNILKEYPTDNQALQNERLFLYYLQNGRDMYTGEALDIDNLSQYDIDHIIPQAFIKDDSIDNRVLVSSAKNRGKSDDVPSLEIVKDCKVFWKKLLDAKLMSQRKYDNLTKAERGGLTSDDKARFIQRQLVETRQITKHVARILDERFNNELDSKGRRIRKVKIVTLKSNLVSNFRKEFGFYKIREVNNYHHAHDAYLNAVVAKAILTKYPQLEPEFVYGDYPKYNSYKTRKSATEKLFFYSNIMNFFKTKVTLADGTVVVKDDIEVNNDTGEIVWDKKKHFATVRKVLSYPQNNIVKKTEIQTGGFSKESILAHGNSDKLIPRKTKDIYLDPKKYGGFDSPIVAYSVLVVADIKKGKAQKLKTVTELLGITIMERSRFEKNPSAFLESKGYLNIRADKLIILPKYSLFELENGRRRLLASAGELQKGNELALPTQFMKFLYLASRYNESKGKPEEIEKKQEFVNQHVSYFDDILQLINDFSKRVILADANLEKINKLYQDNKENISVDELANNIINLFTFTSLGAPAAFKFFDKIVDRKRYTSTKEVLNSTLIHQSITGLYETRIDLGKLGED

SEQ ID NO: 65 - protein, 1370 aa, Streptococcus agalactiae
MNKPYSIGLDIGTNSVGYSVVTDDYKVPAKKMRVLGNTDKEYIKKNLIGALLFDGGNTASDRRLKRTARRRYTCRRNRILYLQEIFAEEMSKVDDSFFHRLEDSFLVEDDKRGSKYPIFATMQEEKDYHEKFPTIYHLRKELADKKEKANLRLVYLALAHIIKFRGHFLIEDDSFDVRNTDIQRQYQAFLEIFDTTFENNHLLSQNIDVEGILTDKISKSAKKDRILAQYPNQKSTGIFAEFLKLIVGNQADFKKHFNLEDKTPLQFAKDSYDEDLENLLGQIGDEFADLFSVAKKLYDSVLLSGILTVTDLSTKAPLSASMIQRYDEHREDLKQLKQFVKASLPEKYQEIFTDSSKDGYAGYIEGKTNQGAFYKYLSKLLTKQEGSEYFLEKIKNEDFLRKQRTFDNGSIPHQVHLTELKAIIRRQSEYYPFLKENLDRIEKILTFRIPYYVGPLAREKSDFAWMTRKTDDSIRPWNFEELVDKEASAEAFIHRMTNNDLYLPEEKVLPKHSLIYEKFTVYNELTKVRYKNEQGETYFFDSNIKQEIFDGVFKEHRKVSKKKLLDFLAKEYEEFRIVDVIGLDKENKAFNASLGTYHDLKKILDKDFLDNPDNESILEDIVQTLTLFEDREMIKKRLENYKDLFTESQLKKLYRRHYTGWGRLSAKLINGIRDKESQKTILDYLISDGRANRNFMQLIHDDGLSFKPIIDKAQAGSHSDNLKEVVGELAGSPAIKKGILQSLKIVDELVKVMGYEPEQVVVEMARENQTTNQGRRNTRQRYKLLEEGVKNLASDLNGNILKEYPTDNQALQNERLFLYYLQNGRDMYTGEALDIDNLSQYDIDHIVPQAFIKDDSIDNRVLVSSAKNRGKSDNVPSIDIVKARKAFWKKLLDAKLMSQRKYDNLTKAERGGLTSDDKARFIQRQLVETRQITKHVARILDERFNNELDSKGRRIRKVKIVTLKSNLVSNFRKEFGFYKIREVNDYHHAHDAYLNAVVAKAILTKYPQLEPEFVYGDYPKYNSYKTRKSATEKLFFYSNIMNFFKTKVTLADGTVVVKDDIEVNNDTGEIVWDKKKHFATVRKVLSYPQVNIVKKTEIQTGGFSKESILAHGNSDKLIPRKTKDIYLDPKKYGGFDSPIVAYSVLVVADIKKGKAQKLKTVTELLGITIMERFRFEKNPSAFLESKGYLNIRDDKLMILPKYSLFELENGRRRLLASAGELQKGNELALPTQYMKFLYLASRYNELKGKPEEIEQKQEFVVQHVSYFDDILQIINDFSNRVILADANLEKINKLYQDNKENISVDELANNIINLFTFTSLGAPAAFKFFDKIVDRKRYTSTKEVLNSTLIHQSITGLYETRIDLGKLGED

SEQ ID NO: 66 - protein, 1370 aa, Streptococcus agalactiae
MNKPYSIGLDIGTNSVGYSVVTDDYKVPAKKMRVLGNTDKEYIKKNLIGALLFDGGNTASDRRLKRTARRRYTRRRNRILYLQEIFAEEMSKVDDSFFHRLEDSFLVEDDKRGSKYPIFATMQEEKDYHEKFPTIYHLRKELADKKEKADLRLVYLALAHIIKFRGHFLIEDDSFDVRNTDIQRQYQAFLEIFDTTFENNHLLSQNIDVEGILTDKISKSAKKDRILAQYPNQKSTGIFAEFLKLIVGNQADFKKHFNLEDKTPLQFAKDSYDEDLENLLGQIGDEFADLFSVAKKLYDSVLLSGILTVTDLSTKAPLSASMIQRYDEHREDLKQLKQFVKASLPEKYQEIFTDSSKDGYAGYIEGKTNQGAFYKYLSKLLTKQEGSEYFLEKIKNEDFLRKQRTFDNGSIPHQVHLTELKAIIRRQSEYYPFLKENLDRIEKILTFRIPYYVGPLAREKSDFAWMTRKTDDSIRPWNFEELVDKEASAEAFIHRMTNNDLYLPEEKVLPKHSLIYEKFTVYNELTKVRYKNEQGETYFFDSNIKQEIFDGVFKEHRKVSKKKLLDFLAKEYEEFRIVDVIGLDKENKAFNASLGTYHDLKKILDKDFLDNPDNESILEDIVQTLTLFEDREMIKKRLENYKDLFTESQLKKLYRRHYTGWGRLSAKLINGIRDKESQKTILDYLISDGRANRNFMQLIHDDGLSFKPIIDKAQAGSHSDNLKEVVGELAGSPAIKKGILQSLKIVDELVKVMGYEPEQVVVEMARENQTTNQGRRNTRQRYKLLEEGVKNLASDLNGNILKEYPTDNQALQNERLFLYYLQNGRDMYTGEALDIDNLSQYDIDHIVPQAFIKDDSIDNRVLVSSAKNRGKSDNVPSIDIVKARKAFWKKLLDAKLMSQRKYDNLTKAERGGLTSDDKARFIQRQLVETRQITKHVARILDERFNNELDSKGRRIRKVKIVTLKSNLVSNFRKEFGFYKIREVNDYHHAHDAYLNAVVAKAILTKYPQLEPEFVYGDYPKYNSYKTRKSATEKLFFYSNIMNFFKTKVTLADGTVVVKDDIEVNNDTGEIVWDKKKHFATVRKVLSYPQVNIVKKTEIQTGGFSKESILAHGNSDKLIPRKTKDIYLDPKKYGGFDSPIVAYSVLVVADIKKGKAQKLKTVTELLGITIMERFRFEKNPSAFLESKGYLNIRDDKLMILPKYSLFELENGRRRLLASAGELQKGNELALPTQYMKFLYLASRYNELKGKPEEIEQKQEFVVQHVSYFDDILQIINDFSNRVILADANLEKINKLYQDNKENISVDELANNIINLFTFTSLGAPAAFKFFDKIVDRKRYTSTKEVLNSTLIHQSITGLYETRIDLGKLGED

SEQ ID NO: 67 - protein, 1370 aa, Streptococcus agalactiae
MNKPYSIGLDIGTNSVGYSVVTDDYKVPAKKMRVLGNTDKEYIKKNLIGALLFDGGNTASDRRLKRTARRRYTRRRNRILYLQEIFAEEMSKVDDSFFHRLEDSFLVEDDKRGSKYPIFATMQEEKDYHEKFPTIYHLRKELADKKEKADLRLVYLALAHIIKFRGHFLIEDDSFDVRNTDIQRQYQAFLEIFDTTFENNHLLSQNIDVEGILTDKISKSAKKDRILAQYPNQKSTGIFAEFLKLIVGNQADFKKHFNLEDKTPLQFAKDSYDEDLENLLGQIGDEFADLFSVAKKLYDSVLLSGILTVTDLSTKAPLSASMIQRYDEHREDLKQLKQFVKASLPEKYQEIFTDSSKDGYAGYIEGKTNQGAFYKYLSKLLTKQEGSEYFLEKIKNEDFLRKQRTFDNGSIPHQVHLTELKAIIRRQSEYYPFLKENLDRIEKILTFRIPYYVGPLAREKSDFAWMTRKTDDSIRPWNFEELVDKEASAEAFIHRMTNNDLYLPEEKVLPKHSLIYEKFTVYNELTKVRYKNEQGETYFFDSNIKQEIFDGVFKEHRKVSKKKLLDFLAKEYEEFRIVDVIGLDKENKAFNASLGTYHDLKKILDKDFLDNPDNESILEDIVQTLTLFEDREMIKKRLENYKDLFTESQLKKLYRRHYTGWGRLSAKLINGIRDKESQKTILDYLISDGRANRNFMQLIHDDGLSFKPIIDKAQAGSHSDNLKEVVGELAGSPAIKKGILQSLKIVDELVKVMGYEPEQVVVEMARENQTTNQGRRNTRQRYKLLEEGVKNLASDLNGNILKEYPTDNQALQNERLFLYYLQNGRDMYTGETLDIDNLSQYDIDHIVPQAFIKDDSIDNRVLVSSAKNRGKSDNVPSIDIVKARKAFWKKLLDAKLMSQRKYDNLTKAERGGLTSDDKARFIQRQLVETRQITKHVARILDERFNNELDSKGRRIRKVKIVTLKSNLVSNFRKEFGFYKIREVNDYHHAHDAYLNAVVAKAILTKYPQLEREFVYGDYPKYNSYKTRKSATEKLFFYSNIMNFFKTKVTLADGTVVVKDDIEVNNDTGEIVWDKKKHFATVRKVLSYPQVNIVKKTEIQTGGFSKESILAHGNSDKLIPRKTKDIYLDPKKYGGFDSPIVAYSVLVVADIKKGKAQKLKTVTELLGITIMERFRFEKNPSAFLESKGYLNIRDDKLMILPKYSLFELENGRRRLLASAGELQKGNELALPTQYMKFLYLASRYNELKGKPEEIEQKQEFVVQHVSYFDDILQIINDFSNRVILADANLEKINKLYQDNKENISVDELANNIINLFTFTSLGAPAAFKFFDKIVDRKRYTSTKEVLNSTLIHQSITGLYETRIDLGKLGED

SEQ ID NO: 68 - protein, 1370 aa, Streptococcus agalactiae
MNKPYSIGLDIGTNSVGYSVVTDDYKVPAKKMRVLGNTDKEYIKKNLIGALLFDGGNTASDRRLKRTARRRYTRRRNRILYLQEIFAEEMSKVDDSFFHRLEDSFLVEDDKRGSKYPIFATMQEEKDYHEKFPTIYHLRKELADKKEKANLRLVYLALAHIIKFRGHFLIEDDSFDVRNTDIQRQYQAFLEIFDTTFENNHLLSQNIDVEGILTDKISKSAKKDRILAQYPNQKSTGIFAEFLKLIVGNQADFKKHFNLEDKTPLQFAKDSYDEDLENLLGQIGDEFADLFSVAKKLYDSVLLSGILTVTDLSTKAPLSASMIQRYDEHREDLKQLKQFVKASLPEKYQEIFTDSSKDGYAGYIEGKTNQGAFYKYLSKLLTKQEGSEYFLEKIKNEDFLRKQRTFDNGSIPHQVHLTELKAIIRRQSEYYPFLKENLDRIEKILTFRIPYYVGPLAREKSDFAWMTRKTDDSIRPWNFEELVDKEASAEAFIHRMTNNDLYLPEEKVLPKHSLIYEKFTVYNELTKVRYKNEQGETYFFDSNIKQEIFDGVFKEHRKVSKKKLLDFLAKEYEEFRIVDVIGLDKENKAFNASLGTYHDLKKILDKDFLDNPDNESILEDIVQTLTLFEDREMIKKRLENYKDLFTESQLKKLYRRHYTGWGRLSAKLINGIRDKESQKTILDYLISDGRANRNFMQLIHDDGLSFKPIIDKAQAGSHSDNLKEVVGELAGSPAIKKGILQSLKIVDELVKVMGYEPEQVVVEMARENQTTNQGRRNTRQRYKLLEEGVKNLASDLNGNILKEYPTDNQALQNERLFLYYLQNGRDMYTGEALDIDNLSQYDIDHIVPQAFIKDDSIDNRVLVSSAKNRGKSDNVPSIDIVKARKAFWKKLLDAKLMSQRKYDNLTKAERGGLTSDDKARFIQRQLVETRQITKHVARILDERFNNELDSKGRRIRKVKIVTLKSNLVSNFRKEFGFYKIREVNDYHHAHDAYLNAVVAKAILTKYPQLEPEFVYGDYPKYNSYKTRKSATEKLFFYSNIMNFFKTKVTLADGTVVVKDDIEVNNDTGEIVWDKKKHFATVRKVLSYPQVNIVKKTEIQTGGFSKESILAHGNSDKLIPRKTKDIYLDPKKYGGFDSPIVAYSVLVVADIKKGKAQKLKTVTELLGITIMERFRFEKNPSAFLESKGYLNIRDDKLMILPKYSLFELENGRRRLLASAGELQKGNELALPTQYMKFLYLASRYNELKGKPEEIEQKQEFVVQHVSYFDDILQIINDFSNRVILADANLEKINKLYQDNKENISVDELANNIINLFTFTSLGAPAAFKFFDKIVDRKRYTSTKEVLNSTLIHQFITGLYETRIDLGKLGED

SEQ ID NO: 69 - protein, 1370 aa, Streptococcus agalactiae
MNKPYSIGLDIGTNSVGYSVVTDDYKVPAKKMRVLGNTDKEYIKKNLIGALLFDGGNTASDRRLKRTARRRYTRRRNRILYLQEIFAEEMSKVDDSFFHRLEDSFLVEDDKRGSKYPIFATMQEEKDYHEKFPTIYHLRKELADKKEKANLRLVYLALAHIIKFRGHFLIEDDSFDVRNTDIQRQYQAFLEIFDTTFENNHLLSQNIDVEGILTDKISKSAKKDRILAQYPNQKSTGIFAEFLKLIVGNQADFKKHFNLEDKTPLQFAKDSYDEDLENLLGQIGDEFADLFSVAKKLYDSVLLSGILTVTDLSTKAPLSASMIQRYDEHREDLKQLKQFVKASLPEKYQEIFTDSSKDGYAGYIEGKTNQGAFYKYLSKLLTKQEGSEYFLEKIKNEDFLRKQRTFDNGSIPHQVHLTELKAIIRRQSEYYPFLKENLDRIEKILTFRIPYYVGPLAREKSDFAWMTRKTDDSIRPWNFEELVDKEASAEAFIHRMTNNDLYLPEEKVLPKHSLIYEKFTVYNELTKVRYKNEQGETYFFDSNIKQEIFDGVFKEHRKVSKKKLLDFLAKEYEEFRIVDVIGLDKENKAFNASLGTYHDLKKILDKDFLDNPDNESILEDIVQTLTLFEDREMIKKRLENYKDLFTESQLKKLYRRHYTGWGRLSAKLINGIRDKESQKTILDYLISDGRANRNFMQLIHDDGLSFKPIIDKAQAGSHSDNLKEVVGELAGSPAIKKGILQSLKIVDELVKVMGYEPEQVVVEMARENQTTNQGRRNTRQRYKLLEEGVKNLASDLNGNILKEYPTDNQALQNERLFLYYLQNGRDMYTGEALDIDNLSQYDIDHIVPQAFIKDDSIDNRVLVSSAKNRGKSDNVPSIDIVKARKAFWKKLLDAKLMSQRKYDNLTKAERGGLTSDDKARFIQRQLVETRQITKHVARILDERFNNELDSKGRRIRKVKIVTLKSNLVSNFRKEFGFYKIREVNDYHHAHDAYLNAVVAKAILTKYPQLEPEFVYGDYPKYNSYKTRKSATEKLFFYSNIMNFFKTKVTLADGTVVVKDDIEVNNDTGEIVWDKKKHFATVRKVLSYPQVNIVKKTEIQTGGFSKESILAHGNSDKLIPRKTKDIYLDPKKYGGFDSPIVAYSVLVVADIKKGKAQKLKTVTELLGITIMERFRFEKNPSAFLESKGYLNIRDDKLMILPKYSLFELENGRRRLLASAGELQKGNELALPTQYMKFLYLASRYNELKGKPEEIEQKQEFVVQHVSYFDDILQIINDFSNRVILADANLEKINKLYQDNKENISVDELANNIINLFTFTSLGAPAAFKFFDKIVDRKRYTSTKEVLNSTLIHQSITGLYETRIDLGKLGED

SEQ ID NO: 70 - protein, 1370 aa, Streptococcus agalactiae
MNKPYSIGLDIGTNSVGWSIITDDYKVPAKKMRVLGNTDKEYIKKNLIGALLFDGGNTAADRRLKRTARRRYTRRRNRILYLQEIFAEEMSKVDDSFFHRLEDSFLVEEDKRGSKYPIFATMQEEKDYHEKFPTIYHLRKELADKKEKADLRLVYLALAHIIKFRGHFLIEDDRFDVRNTDIQKQYQAFLEIFDTSFENNHLLSQNVDVEAILTDKISKSAKKDRILAQYPNQKSTGIFAEFLKLIVGNQADFKKHFNLEDKTPLQFAKDSYDEDLENLLGQIGDEFADLFSAAKKLYDSVLLSGILTVTDLSTKAPLSASMIQRYDEHREDLKQLKQFVKASLPEKYQEIFADSSKDGYAGYIEGKTNQEAFYKYLSKLLTKQEDSEYFLEKIKNEDFLRKQRTFDNGSIPHQVHLTELKAIIRRQSEYYPFLKENQDKIEKILTFRIPYYVGPLARGNSDFAWMTRKTDDSIRPWNFEDLVDKEKSAEAFIHRMTNNDLYLPEEKVLPKHSLIYEKFTVYNELTKVRYKNEQGETYFFDSNVKQEIFDGVFKEHRKVSKKQLLDFLAKEFEEFRIVDVTGLDKENKAFNASLGTYHDLKKILDKDFLDNPDNESILEDIVQTITLFEDREMIKKRLENYKDLFTESQLKKLYRRHYTGWGRLSAKLINGIRDRESQKTILDYLISDGRANRNFMQLINDDGLSFKSIISKAQSGSHSDNLKEVVGELAGSPAIKKGILQSLKIVDELVKVMGYEPEQIVVEMARENQTTNQGRRNSRQRYKLLEDGVKNLASDLNGDILKEYPTDNQALQNERLFLYYLQNGRDMYTGEALDIDNLSQYDIDHIVPQAFIKDDSIDNRVLVSSAKNRGKSDDVPSIDIVKARKAFWKKLLDAKLISQRKYDNLTKAERGGLTPDDKAGFIQRQLVETRQITKHVARILDERFNNKVDDNNKPIRKVKIVTLKSNLVSNFRKEFGFYKIREVNNYHHAHDAYLNAVVAKAILTKYPQLEPEFVYGDYPKYNSYKTRKSATEKLFFYSNIMNFFKTKVTLADETVVVKDDIEVNNETGEIAWDKKKHFATVRKVLSYPQVNIVKKTEVQTGGFSKESILAHSNSDKLIPRKTKDIYLDPKKYGGFDSPIVAYSVLVLADIKKGKAQKLKTVKELIGITIMERERFEKNPSAFLESKGYLNIRTDKLIILPKYSLFELENGRRRLLASAGELQKGNELALPTQYMKFLYLASRYNESKGKPEEIEKKQEFVNQHVSYFDDILQLINDFSKRVILADANLEKINKLYSDNKDNTPVDELAKNIINLFTFTSLGAPAAFKFFDKSVDRKRYTSTKEVLDSTLIHQSITGLYETRIDLGKLGED

SEQ ID NO: 71 - protein, 1370 aa, Streptococcus agalactiae
MNKPYSIGLDIGTNSVGWSIITDDYKVPAKKMRVLGNTDKEYIKKNLIGALLFDGGNTAADRRLKRTARRRYTRRRNRILYLQEIFAEEMSKVDDSFFHRLEDSFLVEEDKRGSKYPIFATMQEEKYYHEKFPTIYHLRKELADKKEKADLRLIYLALAHIIKFRGHFLIEDDRFDVRNTDIQKQYQAFLEIFDTTFENNDLLSQNVDVEAILTDKISKSAKKDRILARYPNQKSTGIFAEFLKLIVGNQADFKKHFNLEDKTPLQFAKDSYDEDLENLLGQIGDEFADLFSAAKKLYDSVLLSGILTVTDLSTKAPLSASMIQRYDEHREDLKQLKQFVKASLPEKYQEIFADSSKDGYAGYIEGKTNQEAFYKYLSKLLTKQEGSEYLLEKIKNEDFLRKQRTFDNGSIPHQVHLTELRAIIRRQSEYYPFLKENLDRIEKILTFRIPYYVGPLAREKSDFAWMTRKTDDSIRPWNFEDLVDKEKSAEAFIHRMTNNDLYLPEEKVLPKHSLIYEKFTVYNELTKVRFLAEGFKDFQFLNRKQKETIFNSLFKEKRKVTEKDIISFLNKVDGYEGIAIKGIEKQFNASLSTYHDLKKILGKDFLDNTDNELILEDIVQTLTLFEDREMIRKRLDIYKDFFTESQLKKLYRRHYTGWGRLSAKLINGIRNKENQKTILDYLIDDGSANRNFMQLIKDAGLSFKPIIDKARTGSHSDNLKEVVGELAGSPAIKKGILQSLKIVDELVKVMGYEPEQIVVEMARENQTTAKGLSRLRQRLTTLRESLANLKSNILEEKKPKYVKDQVENHHLSDDRLFLYYLQNGKDMYTDDELDIDNLSQYDIDLIIPQAFIKDDSIDNRVLVSSAKNRGKSDDVPSVEIVKDCKVFWKKLLDAKLMSQRKYDNLTKAERGGLTSDDKARFIQRQLVETRQITKHVARILDERFNNELDSKGRRIRKVKIVTLKSNLVSNFRKEFGFYKIREVNNYHHAHDAYLNAVVAKAILTKYPQLEPEFVYGDYPKYNSYKTRKSATEKLFFYSNIMNFFKTKVTLADGTVVVKDDIEVNNDTGEIVWDKKKHFATVRKVLSYPQVNIVKKTEIQTGGFSKESILAHGNSDKLIPRKTKDIYLDPKKYGGFDSPIVAYSVLVVADIKKGKAQKLKTVTELLGITIMERSRFEKNPSAFLESKGYLNIRDDKLMILPKYSLFELENGRRRLLASADELQKGNELALPTQFMKFLYLASRYNELKGKPEEIEQKQEFVVQHVSYFDDILQIINDFSNRVILADANLEKINKLYQDNKENIPVDELANNIINLFTFTSLGAPAAFKFFDKIVDRKRYTSTKEVLNSTLIHQSITGLYETRIDLGKLGED

SEQ ID NO: 72 - protein, 1370 aa, Streptococcus agalactiae
MNKPYSIGLDIGTNSVGWSIITDDYKVPAKKMRVLGNTDKEYIKKNLIGALLFDGGNTASDRRLKRTARRRYTRRRNRILYLQEIFAEEMSKVDDSFFHRLEDSFLVEDDKRGSKYPIFATMQEEKDYHEKFPTIYHLRKELADKKEKADLRLFYLALAHIIKFRGHFLIEDDSFDVRNTDIQRQYQAFLEIFDTTFENNHLLSQNIDIEGILTDKISKSAKKDRILAQYPNQKSTGIFAEFLKLIVGNQADFKKHFNLEDKTPLQFAKDSYDEDLENLLGQIGDEFADLFSVAKKLYDSVLLSGILTVTDLSTKAPLSASMIQRYDEHREDLKQLKQFVKASLPEKYQEIFTDSSKDGYAGYIEGKTNQGAFYKYLSKLLTKQEGSEYFLEKIKNEDFLRKQRTFDNGSIPHQVHLTELKAIIRRQSEYYPFLKENLDRIEKILTFRIPYYVGPLAREKSDFAWMTRKTDDSIRPWNFEELVDKEASAEAFIHRMTNNDLYLPEEKVLPKHSLIYEKFTVYNELTKVRYKNEQGETYFFDSNIKQEIFDGVFKEHRKVSKKKLLDFLAKEYEEFRIVDVIGLDKENKAFNASLGTYHDLKKILDKDFLDNPDNESILEDIVQTLTLFEDREMIKKRLENYKDLFTESQLKKLYRRHYTGWGRLSAKLINGIRDKESQKTILDYLIDDGKSNRNFMQLIHDDGLSFKSIISKAQAGSHSDNLKEVVGELAGSPAIKKGILQSLKIVDELVKVMGYEPEQIVVEMARENQTTNQGRRNSRQRYKLLDDGVKNLASDLNGNILKEYPTDNQALQNERLFLYYLQNGRDMYTGKALDIDNLSQYDIDHIIPQAFIKDDSIDNRVLVSSAKNRGKSDDVPSLEIVKDCKVFWKKLLDAKLMSQRKYDNLTKAERGGLTSDDKARFIQRQLVETRQITKHVARILDERFNNELDSKGRRIRKVKIVTLKSNLVSNFRKEFGFYKIREVNNYHHAHDAYLNAVVAKAILTKYPQLEPEFVYGDYPKYNSYKTRKSATEKLFFYSNIMNFFKTKVTLADGTVVVKDDIEVNNDTGEIVWDKKKHFATVRKVLSYPQVNIVKKTEIQTGGFSKESILAHGNSDKLIPRKTKDIYLDPKKYGGFDSPIVAYSVLVVADIKKGKAQKLKTVTELLGITIMERSRFEKNPSAFLESKGYLNIRDDKLMILPKYSLFELENGRRRLLASAGELQKGNELALPTQFMKFLYLASRYNELKGKPEEIEQKQEFVVQHVSYFDDILQIINDFSNRVILADANLEKINKLYQDNKENISVDELANNIINLFTFTSLGAPAAFKFFDKIVDRKRYTSTKEVLNSTLIHQSITGLYETRIDLGKLGED

SEQ ID NO: 73 - protein, 1370 aa, Streptococcus agalactiae
MNKPYSIGLDIGTNSVGWSIITDDYKVPAKKMRVLGNTDKEYIKKNLIGALLFDGGNTASDRRLKRTARRRYTRRRNRILYLQEIFAEEMSKVDDSFFHRLEDSFLVEDDKRGSKYPIFATMQEEKDYHEKFPTIYHLRKELADKKEKADLRLFYLALAHIIKFRGHFLIEDDSFDVRNTDIQRQYQAFLEIFDTTFENNHLLSQNIDVEGILTDKISKSAKKDRILAQYPNQKSTGIFAEFLKLIVGNQADFKKHFNLEDKTPLQFAKDSYDEDLENLLGQIGDEFADLFSVAKKLYDSVLLSGILTVTDLSTKAPLSASMIQRYDEHREDLKQLKQFVKASLPEKYQEIFTDSSKDGYAGYIEGKTNQGAFYKYLSKLLTKQEGSEYFLEKIKNEDFLRKQRTFDNGSIPHQVHLTELKAIIRRQSEYYPFLKENLDRIEKILTFRIPYYVGPLAREKSDFAWMTRKTDDSIRPWNFEELVDKEASAEAFIHRMTNNDLYLPEEKVLPKHSLIYEKFTVYNELTKVRYKNEQGETYFFDSNIKQEIFDGVFKEHRKVSKKKLLDFLAKEYEEFRIVDVIGLDKENKAFNASLGTYHDLKKILDKDFLDNPDNESILEDIVQTLTLFEDREMIKKRLENYKDLFTESQLKKLYRRHYTGWGRLSAKLINGIRDKESQKTILDYLIDDGKSNRNFMQLIHDDGLSFKSIISKAQAGSHSDNLKEVVGELAGSPAIKKGILQSLKIVDELVKVMGYEPEQIVVEMARENQTTNQGRRNSRQRYKLLDDGVKNLASDLNGNILKEYPTDNQALQNERLFLYYLQNGRDMYTGKALDIDNLSQYDIDHIIPQAFIKDDSIDNRVLVSSAKNRGKSDDVPSLEIVKDCKVFWKKLLDAKLMSQRKYDNLTKAERGGLTSDDKARFIQRQLVETRQITKHVARILDERFNNELDSKGRRIRKVKIVTLKSNLVSNFRKEFGFYKIREVNNYHHAHDAYLNAVVAKAILTKYPQLEPEFVYGDYPKYNSYKTRKSATEKLFFYSNIMNFFKTKVTLADGTVVVKDDIEVNNDTGEIVWDKKKHFATVRKVLSYPQVNIVKKTEIQTGGFSKESILAHGNSDKLIPRKTKDIYLDPKKYGGFDSPIVAYSVLVVADIKKGKAQKLKTVTELLGITIMERSRFEKNPSAFLESKGYLNIRDDKLMILPKYSLFELENGRRRLLASAGELQKGNELALPTQFMKFLYLASRYNELKGKPEEIEQKQEFVVQHVSYFDDILQIINDFSNRVILADANLEKINKLYQDNKENISVDELANNIINLFTFTSLGAPAAFKFFDKIVDRKRYTSTKEVLNSTLIHQSITGLYETRIDLGKLGED

SEQ ID NO: 74 - protein, 1370 aa, Streptococcus agalactiae
MNKPYSIGLDIGTNSVGWSIITDDYKVPAKKMRVLGNTDKEYIKKNLIGALLFDGGNTAADRRLKRTARRRYTRRRNRILYLQEIFAEEMSKVDDSFFHRLEDSFLVEEDKRGSKYPIFATLQEEKDYHEKFPTIYHLRKELADKKEKADLRLIYIALAHIIKFRGHFLIEDDSFDVRNTDISKQYQDFLEIFNTTFENNDLLSQNVDVEAILTDKISKSAKKDRILAQYPNQKSTGIFAEFLKLIVGNQADFKKYFNLEDKTPLQFAKDSYDEDLENLLGQIGDEFADLFSAAKKLYDSVLLSGILTVIDLSTKAPLSASMIQRYDEHREDLKQLKQFVKASLPEKYQEIFADSSKDGYAGYIEGKTNQEAFYKYLSKLLTKQEDSENFLEKIKNEDFLRKQRTFDNGSIPHQVHLTELKAIIRRQSEYYPFLKENQDRIEKILTFRIPYYIGPLAREKSDFAWMTRKTDDSIRPWNFEDLVDKEKSAEAFIHRMTNNDFYLPEEKVLPKHSLIYEKFTVYNELTKVRYKNEQGETYFFDSNIKQEIFDGVFKEHRKVSKKKLLDFLAKEYEEFRIVDVIGLDKENKAFNASLGTYHDLEKILDKDFLDNPDNESILEDIVQTLTLFEDREMIKKRLENYKDLFTESQLKKLYRRHYTGWGRLSAKLINGIRDKESQKTILDYLIDDGRSNRNFMQLINDDGLSFKSIISKAQAGSHSDNLKEVVGELAGSPAIKKGILQSLKIVDELVKVMGYEPEQIVVEMARENQTTNQGRRNSRQRYKLLDDGVKNLASDLNGNILKEYPTDNQALQNERLFLYYLQNGRDMYTGEALDIDNLSQYDIDHIIPQAFIKDDSIDNRVLVSSAKNRGKSDDVPSLEIVKDCKVFWKKLLDAKLMSQRKYDNLTKAERGGLTSDDKARFIQRQLVETRQITKHVARILDERFNNELDSKGRRIRKVKIVTLKSNLVSNFRKEFGFYKIREVNNYHHAHDAYLNAVVAKAILTKYPQLEPEFVYGDYPKYNSYKTRKSATEKLFFYSNIMNFFKTKVTLADGTVVVKDDIEVNNDTGEIVWDKKKHFATVRKVLSYPQNNIVKKTEIQTGGFSKESILAHGNSDKLIPRKTKDIYLDPKKYGGFDSPIVAYSVLVVADIKKGKAQKLKTVTELLGITIMERSRFEKNPSAFLESKGYLNIRADKLIILPKYSLFELENGRRRLLASAGELQKGNELALPTQFMKFLYLASRYNESKGKPEEIEKKQEFVNQHVSYFDDILQLINDFSKRVILADANLEKINKLYQDNKENISVDELANNIINLFTFTSLGAPAAFKFFDKIVDRKRYTSTKEVLNSTLIHQSITGLYETRIDLGKLGED

SEQ ID NO: 75 - protein, 1370 aa, Streptococcus agalactiae
MNKPYSIGLDIGTNSVGYSVVTDDYKVPAKKMRVLGNTDKEYIKKNLIGALLFDGGNTASDRRLKRTARRRYTRRRNRILYLQEIFAEEMSKVDDSFFHRLEDSFLVEDDKRGSKYPIFATMQEEKDYHEKFPTIYHLRKELADKKEKADLRLVYLALAHIIKFRGHFLIEDDSFDVRNTDIQRQYQAFLEIFDTTFENNHLLSQNIDVEGILTDKISKSAKKDRILAQYPNQKSTGIFAEFLKLIVGNQADFKKHFNLEDKTPLQFAKDSYDEDLENLLGQIGDEFADLFSVAKKLYDSVLLSGILTVTALSTKAPLSASMIQRYDEHREDLKQLKQFVKASLPEKYQEIFTDSSKDGYAGYIEGKTNQGAFYKYLSKLLTKQEGSEYFLEKIKNEDFLRKQRTFDNGSIPHQVHLTELKAIIRRQSEYYPFLKENLDRIEKILTFRIPYYVGPLAREKSDFAWMTRKTDDSIRPWNFEELVDKEASAEAFIHRMTNNDLYLPEEKVLPKHSLIYEKFTVYNELTKVRYKNEQGETYFFDSNIKQEIFDGVFKEHRKVSKKKLLDFLAKEYEEFRIVDVIGLDKENKAFNASLGTYHDLKKILDKDFLDNPDNESILEDIVQTLTLFEDREMIKKRLENYKDLFTESQLKKLYRRHYTGWGRLSAKLINGIRDKESQKTILDYLISDGRANRNFMQLIHDDGLSFKPIIDKAQAGSHSDNLKEVVGELAGSPAIKKGILQSLKIVDELVKVMGYEPEQVVVEMARENQTTNQGRRNTRQRYKLLEEGVKNLASDLNGNILKEYPTDNQALQNERLFLYYLQNGRDMYTGEALDIDNLSQYDIDHIVPQAFIKDDSIDNRVLVSSAKNRGKSDNVPSIDIVKARKAFWKKLLDAKLMSQRKYDNLTKAERGGLTSDDKARFIQRQLVETRQITKHVARILDERFNNELDSKGRRIRKVKIVTLKSNLVSNFRKEFGFYKIREVNDYHHAHDAYLNAVVAKAILTKYPQLEPEFVYGDYPKYNSYKTRKSATEKLFFYSNIMNFFKTKVTLADGTVVVKDDIEVNNDTGEIVWDKKKHFATVRKVLSYPQVNIVKKTEIQTGGFSKESILAHGNSDKLIPRKTKDIYLDPKKYGGFDSPIVAYSVLVVADIKKGKAQKLKTVTELLGITIMERFRFEKNPSAFLESKGYLNIRDDKLMILPKYSLFELENGRRRLLASAGELQKGNELALPTQYMKFLYLASRYNELKGKPEEIEQKQEFVVQHVSYFDDILQIINDFSNRVILADANLEKINKLYQDNKENISVDELANNIINLFTFTSLGAPAAFKFFDKIVDRKRYTSTKEVLNSTLIHQSITGLYETRIDLGKLGED

SEQ ID NO: 76 - protein, 1370 aa, Streptococcus agalactiae
MNKPYSIGLDIGTNSVGWSIITDDYKVPAKKMRVLGNTDKEYIKKNLIGALLFDGGNTAADRRLKRTARRRYTRRRNRILYLQEIFAEEMSKVDDSFFHRLEDSFLVEEDKRGSKYPIFATLQEEKDYHEKFSTIYHLRKELADKKEKADLRLIYIALAHIIKFRGHFLIEDDSFDVRNTDISKQYQDFLEIFNTTFENNDLLSQNVDVEAILTDKISKSAKKDRILAQYPNQKSTGIFAEFLKLIVGNQADFKKYFNLEDKTPLQFAKDSYDEDLENLLGQIGDEFADLFSAAKKLYDSVLLSGILTVIDLSTKAPLSASMIQRYDEHREDLKQLKQFVKASLPEKYQEIFADSSKDGYAGYIEGKTNQEAFYKYLSKLLTKQEDSENFLEKIKNEDFLRKQRTFDNGSIPHQVHLTELKAIIRRQSEYYPFLKENQDRIEKILTFRIPYYIGPLAREKSDFAWMTRKTDDSIRPWNFEDLVDKEKSAEAFIHRMTNNDFYLPEEKVLPKHSLIYEKFTVYNELTKVRYKNEQGETYFFDSNIKQEIFDGVFKEHRKVSKKKLLDFLAKEYEEFRIVDVIGLDKENKAFNASLGTYHDLEKILDKDFLDNPDNESILEDIVQTLTLFEDREMIKKRLENYKDLFTESQLKKLYRRHYTGWGRLSAKLINGIRDKESQKTILDYLIDDGRSNRNFMQLINDDGLSFKSIISKAQAGSHSDNLKEVVGELAGSPAIKKGILQSLKIVDELVKVMGYEPEQIVVEMARENQTTNQGRRNSRQRYKLLDDGVKNLASDLNGNILKEYPTDNQALQNERLFLYYLQNGRDMYTGEALDIDNLSQYDIDHIIPQAFIKDDSIDNRVLVSSAKNRGKSDDVPSLEIVKDCKVFWKKLLDAKLMSQRKYDNLTKAERGGLTSDDKARFIQRQLVETRQITKHVARILDERFNNELDSKGRRIRKVKIVTLKSNLVSNFRKEFGFYKIREVNNYHHAHDAYLNAVVAKAILTKYPQLEPEFVYGDYPKYNSYKTRKSATEKLFFYSNIMNFFKTKVTLADGTVVVKDDIEVNNDTGEIVWDKKKHFATVRKVLSYPQNNIVKKTEIQTGGFSKESILAHGNSDKLIPRKTKDIYLDPKKYGGFDSPIVAYSVLVAADIKKGKAQKLKTVTELLGITIMERSRFEKNPSAFLESKGYLNIRADKLIILPKYSLFELENGRRRLLASAGELQKGNELALPTQFMKFLYLASRYNESKGKPEEIEKKQEFVNQHVSYFDDILQLINDFSKRVILADANLEKINKLYQDNKENISVDELANNIINLFTFTSLGAPAAFKFFDKIVDRKRYTSTKEVLNSTLIHQSITGLYETRIDLGKLGED

SEQ ID NO: 77 - protein, 1370 aa, Streptococcus agalactiae
MNKPYSIGLDIGTNSVGWSIITDDYKVPAKKMRVLGNTDKEYIKKNLIGALLFDGGNTAADRRLKRTARRRYTRRRNRILYLQEIFAEEMSKVDDSFFHRLEDSFLVEEDKRGSKYPIFATLQEEKDYHEKFSTIYHLRKELADKKEKADLRLIYIALAHIIKFRGHFLIEDDSFDVRNTDISKQYQDFLEIFNTTFENNDLLSQNVDVEAILTDKISKSAKKDRILAQYPNQKSTGIFAEFLKLIVGNQADFKKYFNLEDKTPLQFAKDSYDEDLENLLGQIGDEFADLFSAAKKLYDSVLLSGILTVIDLSTKASLSDSMIQRYDEHREDLKQLKQFVKASLPEKYQEIFADSSKDGYAGYIEGKTNQEAFYKYLSKLLTKQEDSENFLEKIKNEDFLRKQRTFDNGSIPHQVHLTELKAIIRRQSEYYPFLKENQDRIEKILTFRIPYYIGPLAREKSDFAWMTRKTDDSIRPWNFEDLVDKEKSAEAFIHRMTNNDFYLPEEKVLPKHSLIYEKFTVYNELTKVRYKNEQGETYFFDSNIKQEIFDGVFKEHRKVSKKKLLDFLAKEYEEFRIVDVIGLDKENKAFNASLGTYHDLEKILDKDFLDNPDNESILEDIVQTLTLFEDREMIKKRLENYKDLFTESQLKKLYRRHYTGWGRLSAKLINGIRDKESQKTILDYLIDDGRSNRNFMQLINDDGLSFKSIISKAQAGSHSDNLKEVVGELAGSPAIKKGILQSLKIVDELVKVMGYEPEQIVVEMARENQTTNQGRRNSRQRYKLLDDGVKNLASDLNGNILKEYPTDNQALQNERLFLYYLQNGRDMYTGEALDIDNLSQYDIDHIIPQAFIKDDSIDNRVLVSSAKNRGKSDDVPSLEIVKDCKVFWKKLLDAKLMSQRKYDNLTKAERGGLTSDDKARFIQRQLVETRQITKHVARILDERFNNELDSKGRRIRKVKIVTLKSNLVSNFRKEFGFYKIREVNNYHHAHDAYLNAVVAKAILTKYPQLEPEFVYGDYPKYNSYKTRKSATEKLFFYSNIMNFFKTKVTLADGTVVVKDDIEVNNDTGEIVWDKKKHFATVRKVLSYPQNNIVKKTEIQTGGFSKESILAHGNSDKLIPRKTKDIYLDPKKYGGFDSPIVAYSVLVVADIKKGKAQKLKTVTELLGITIMERSRFEKNPSAFLESKGYLNIRADKLIILPKYSLFELENGRRRLLASAGELQKGNELALPTQFMKFLYLASRYNESKGKPEEIEKKQEFVNQHVSYFDDILQLINDFSKRVILADANLEKINKLYQDNKENISVDELANNIINLFTFTSLGAPAAFKFFDKIVDRKRYTSTKEVLNSTLIHQSITGLYETRIDLGKLGED

SEQ ID NO: 78 - protein, 1370 aa, Streptococcus agalactiae
MNKPYSIGLDIGTNSVGWSIITDDYKVPAKKMRVLGNTDKEYIKKNLIGALLFDGGNTAADRRLKRTARRRYTRRRNRILYLQEIFAEEMSKVDDSFFHRLEDSFLVEEDKRGSKYPIFATLQEEKDYHEKFSTIYHLRKELADKKEKADLRLIYIALAHIIKFRGHFLIEDDSFDVRNTDISKQYQDFLEIFNTTFENNDLLSQNVDVEAILTDKISKSAKKDRILAQYPNQKSTGIFAEFLKLIVGNQADFKKYFNLEDKTPLQFAKDSYDEDLENLLGQIGDEFADLFSAAKKLYDSVLLSGILTVIDLSTKAPLSASMIQRYDEHREDLKQLKQFVKASLPEKYQEIFADSSKDGYAGYIEGKTNQEAFYKYLSKLLTKQEDSENFLEKIKNEDFLRKQRTFDNGSIPHQVHLTELKAIIRRQSEYYPFLKENQDRIEKILTFRIPYYIGPLAREKSDFAWMTRKTDDSIRPWNFEDLVDKEKSAEAFIHRMTNNDFYLPEEKVLPKHSLIYEKFTVYNELTKVRYKNEQGETYFFDSNIKQEIFDGVFKEHRKVSKKKLLDFLAKEYEEFRIVDVIGLDKENKAFNASLGTYHDLEKILDKDFLDNPDNESILEDIVQTLTLFEDREMIKKRLENYKDLFTESQLKKLYRRHYTGWGRLSAKLINGIRDKESQKTILDYLIDDGRSNRNFMQLINDDGLSFKSIISKAQAGSHSDNLKEVVGELAGSPAIKKGILQSLKIVDELVKVMGYEPEQIVVEMARENQTTNQGRRNSRQRYKLLDDGVKNLASDLNGNILKEYPTDNQALQNERLFLYYLQNGRDMYTGEALDIDNLSQYDIDHIIPQAFIKDDSIDNRVLVSSAKNRGKSDDVPSLEIVKDCKVFWKKLLDAKLMSQRKYDNLTKAERGGLTSDDKARFIQRQLVEIRQITKHVARILDERFNNELDSKGRRIRKVKIVTLKSNLVSNFRKEFGFYKIREVNNYHHAHDAYLNAVVAKAILTKYPQLEPEFVYGDYPKYNSYKTRKSATEKLFFYSNIMNFFKTKVTLADGTVVVKDDIEVNNDTGEIVWDKKKHFATVRKVLSYPQNNIVKKTEIQTGGFSKESILAHGNSDKLIPRKTKDIYLDPKKYGGFDSPIVAYSVLVVADIKKGKAQKLKTVTELLGITIMERSRFEKNPSAFLESKGYLNIRADKLIILPKYSLFELENGRRRLLASAGELQKGNELALPTQFMKFLYLASRYNESKGKPEEIEKKQEFVNQHVSYFDDILQLINDFSKRVILADANLEKINKLYQDNKENISVDELANNIINLFTFTSLGAPAAFKFFDKIVDRKRYTSTKEVLNSTLIHQSITGLYETRIDLGKLGED

SEQ ID NO: 79 - protein, 1370 aa, Streptococcus agalactiae
MNKPYSIGLDIGTNSVGWSIITDDYKVPAKKMRVLGNTDKEYIKKNLIGALLFDGGNTAADRRLKRTARRRYTRRRNRILYLQEIFAEEMSKVDDSFFHRLEDSFLVEEDKRGSKYPIFATLQEEKDYHEKFSTIYHLRKELADKKEKADLRLIYIALAHIIKFRGHFLIEDDSFDVRNTDISKQYQDFLEIFNTTFENNDLLSQNVDVEAILTDKISKSAKKDRILAQYPNQKSTGIFAEFLKLIVGNQADFKKYFNLEDKTPLQFAKDSYDEDLENLLGQIGDEFADLFSAAKKLYDSVLLSGILTVIDLSTKAPLSASMIQRYDEHREDLKQLKQFVKASLPEKYQEIFADSSKDGYAGYIEGKTNQEAFYKYLSKLLTKQEDSENFLEKIKNEDFLRKQRTFDNGSIPHQVHLTELKAIIRRQSEYYPFLKENQDRIEKILTFRIPYYIGPLAREKSDFAWMTRKTDDSIRPWNFEDLVDKEKSAEAFIHRMTNNDFYLPEEKVLPKHSLIYEKFTVYNELTKVRYKNEQGETYFFDSNIKQEIFDGVFKEHRKVSKKKLLDFLAKEYEEFRIVDVIGLDKENKAFNASLGTYHDLEKILDKDFLDNPDNESILEDIVQTLTLFEDREMIKKRLENYKDLFTESQLKKLYRRHYTGWGRLSAKLINGIRDKESQKTILDYLIDDGRSNRNFMQLINDDGLSFKSIISKAQAGSHSDNLKEVVGELAGSPAIKKGILQSLKIVDELVKVMGYEPEQIVVEMARENQTTNQGRRNSRQRYKLLDDGVKNLASDLNGNILKEYPTDNQALQNERLFLYYLQNGRDMYTGEALDIDNLSQYDIDHIIPQAFIKDDSIDNRVLVSSAKNRGKSDDVPSLEIVKDCKVFWKKLLDAKLMSQRKYDNLTKAERGGLTSDDKARFIQRQLVETRQITKHVARILDERFNNELDSKGRRIRKVKIVTVKSNLVSNFRKEFGFYKIREVNNYHHAHDAYLNAVVAKAILTKYPQLEPEFVYGDYPKYNSYKTRKSATEKLFFYSNIMNFFKTKVTLADGTVVVKDDIEVNNDTGEIVWDKKKHFATVRKVLSYPQNNIVKKTEIQTGGFSKESILAHGNSDKLIPRKTKDIYLDPKKYGGFDSPIVAYSVLVVADIKKGKAQKLKTVTELLGITIMERSRFEKNPSAFLESKGYLNIRADKLIILPKYSLFELENGRRRLLASAGELQKGNELALPTQFMKFLYLASRYNESKGKPEEIEKKQEFVNQHVSYFDDILQLINDFSKRVILADANLEKINKLYQDNKENISVDELANNIINLFTFTSLGAPAAFKFFDKIVDRKRYTSTKEVLNSTLIHQSITGLYETRIDLGKLGED

SEQ ID NO: 80 - protein, 1370 aa, Streptococcus agalactiae
MNKPYSIGLDIGTNSVGWSIITDDYKVPAKKMRVLGNTDKEYIKKNLIGALLFDGGNTAADRRLKRTARRRYTRRRNRILYLQEIFAEEMSKVDDSFFHRLEDSFLVEEDKRGSKYPIFATLQEEKDYHEKFSTIYHLRKELADKKEKADLRLIYIALAHIIKFRGHFLIEDDSFDVRNTDISKQYQDFLEIFNTTFENNDLLSQNVDVEAILTDKISKSAKKDRILAQYPNQKSTGIFAEFLKLIVGNQADFKKYFNLEDKTPLQFAKDSYDEDLENLLGQIGDEFADLFSAAKKLYDSVLLSGILTVIDLSTKAPLSASMIQRYDEHREDLKQLKQFVKASLPEKYQEIFADSSKDGYAGYIEGKTNQEAFYKYLSKLLTKQEDSENFLEKIKNEDFLRKQRTFDNGSIPHQVHLTELKAIIRRQSEYYPFLKENQDRIEKILTFRIPYYIGPLAREKSDFAWMTRKTDDSIRPWNFEDLVDKEKSAEAFIHRMTNNDFYLPEEKVLPKHSLIYEKFTVYNELTKVRYKNEQGETYFFDSNIKQEIFDGVFKEHRKVSKKKLLDFLAKEYEEFRIVDVIGLDKENKAFNASLGTYHDLEKILDKDFLDNPDNESILEDIVQTLTLFEDREMIKKRLENYKDLFTESQLKKLYRRHYTGWGRLSAKLINGIRDKESQKTILDYLIDDGRSNRNFMQLINDDGLSFKSIISKAQAGSHSDNLKEVVGELAGSPAIKKGILQSLKIVDELVKVMGYEPEQIVVEMARENQTTNQGRRNSRQRYKLLDDGVKNLASDLNGNILKEYPTDNQALQNERLFLYYLQNGRDMYTGEALDIDNLSQYDIDHIIPQAFIKDDSIDNRVLVSSAKNRGKSDDVPSLEIVKDCKVFWKKLLDAKLMSQRKYDNLTKAERGGLTSDDKARFIQRQLVETRQITKHVARILDELFNNELDSKGRRIRKVKIVTLKSNLVSNFRKEFGFYKIREVNNYHHAHDAYLNAVVAKAILTKYPQLEPEFVYGDYPKYNSYKTRKSATEKLFFYSNIMNFFKTKVTLADGTVVVKDDIEVNNDTGEIVWDKKKHFATVRKVLSYPQNNIVKKTEIQTGGFSKESILAHGNSDKLIPRKTKDIYLDPKKYGGFDSPIVAYSVLVVADIKKGKAQKLKTVTELLGITIMERSRFEKNPSAFLESKGYLNIRADKLIILPKYSLFELENGRRRLLASAGELQKGNELALPTQFMKFLYLASRYNESKGKPEEIEKKQEFVNQHVSYFDDILQLINDFSKRVILADANLEKINKLYQDNKENISVDELANNIINLFTFTSLGAPAAFKFFDKIVDRKRYTSTKEVLNSTLIHQSITGLYETRIDLGKLGGD

SEQ ID NO: 81 - protein, 1384 aa, Streptococcus agalactiae
MNKPYSIGLDIGTNSVGWSIITDDYKVPAKKMRVLGNTDKEYIKKNLIGALLFDGGNTAADRRLKRTARRRYTRRRNRILYLQEIFAEEMSKVDDSFFHRLEDSFLVEEDKRGSKYPIFATLQEEKDYHEKFSTIYHLRKELADKKEKADLRLIYIALAHIIKFRGHFLIEDDSFDVRNTDISKQYQDFLEIFNTTFENNDLLSQNVDVEAILTDKISKSAKKDRILAQYPNQKSTGIFAEFLKLIVGNQADFKKYFNLEDKTPLQFAKDSYDEDLENLLGQIGDEFADLFSAAKKLYDSVLLSGILTVIDLSTKAPLSASMIQRYDEHREDLKQLKQFVKASLPEKYQEIFADSSKDGYAGYIEGKTNQEAFYKYLSKLLTKQEDSENFLEKIKNEDFLRKQRTFDNGSIPHQVHLTELKAIIRRQSEYYPFLKENQDRIEKILTFRIPYYIGPLAREKSDFAWMTRKTDDSIRPWNFEDLVDKEKSAEAFIHRMTNNDFYLPEEKVLPKHSLIYEKFTVYNELTKVRYKNEQGETYFFDSNIKQEIFDGVFKEHRKVSKKKLLDFLAKEYEEFRIVDVIGLDKENKAFNASLGTYHDLEKILDKDFLDNPDNESILEDIVQTLTLFEDREMIKKRLENYKDLFTESQLKKLYRRHYTGWGRLSAKLINGIRDKESQKTILDYLIDDGRSNRNFMQLINDDGRSNRNFMQLINDDGLSFKSIISKAQAGSHSDNLKEVVGELAGSPAIKKGILQSLKIVDELVKVMGYEPEQIVVEMARENQTTNQGRRNSRQRYKLLDDGVKNLASDLNGNILKEYPTDNQALQNERLFLYYLQNGRDMYTGEALDIDNLSQYDIDHIIPQAFIKDDSIDNRVLVSSAKNRGKSDDVPSLEIVKDCKVFWKKLLDAKLMSQRKYDNLTKAERGGLTSDDKARFIQRQLVETRQITKHVARILDERFNNELDSKGRRIRKVKIVTLKSNLVSNFRKEFGFYKIREVNNYHHAHDAYLNAVVAKAILTKYPQLEPEFVYGDYPKYNSYKTRKSATEKLFFYSNIMNFFKTKVTLADGTVVVKDDIEVNNDTGEIVWDKKKHFATVRKVLSYPQNNIVKKTEIQTGGFSKESILAHGNSDKLIPRKTKDIYLDPKKYGGFDSPIVAYSVLVVADIKKGKAQKLKTVTELLGITIMERSRFEKNPSAFLESKGYLNIRADKLIILPKYSLFELENGRRRLLASAGELQKGNELALPTQFMKFLYLASRYNESKGKPEEIEKKQEFVNQHVSYFDDILQLINDFSKRVILADANLEKINKLYQDNKENISVDELANNIINLFTFTSLGAPAAFKFFDKIVDRKRYTSTKEVLNSTLIHQSITGLYETRIDLGKLGED

SEQ ID NO: 82 - protein, 1370 aa, Streptococcus agalactiae
MNKPYSIGLDIGTNSVGYSVVTDDYKVPAKKMRVLGNTDKEYIKKNLIGALLFDGGNTASDRRLKRTARRRYTRRRNRILYLQEIFAEEMSKVDDSFFHRLEDSFLVEDDKRGSKYPIFATMQEEKDYHEKFPTIYHLRKELADKKEKANLRLVYLALAHIIKFRGHFLIEDDSFDVRNTDIQRQYQAFLEIFDTTFENNHLLSQNIDVEGILTDKISKSAKKDRILAQYPNQKSTGIFAEFLKLIVGNQADFKKHFNLEDKTPLQFAKDSYDEDLENLLGQIGDEFADLFSVAKKLYDSVLLSGILTVTDLSTKAPLSASMIQRYDEHREDLKQLKQFVKASLPEKYQEIFTDSSKDGYAGYIEGKTNQGAFYKYLSKLLTKQEGSEYFLEKIKNEDFLRKQRTFDNGSIPHQVHLTELKAIIRRQSEYYPFLKENLDRIEKILTFRIPYYVGPLAREKSDFAWMTRKTDDSIRPWNFEELVDKEASAEAFIHRMTNNDLYLPEEKVLPKHSLIYEKFTVYNELTKVRYKNEQGETYFFDSNIKQEIFDGVFKEHRKVSKKKLLDFLAKEYEEFRIVDVIGLDKENKAFNASLGTYHDLKKILDKDFLDNPDNESILEDIVQTLTLFEDREMIKKRLENYKDLFTESQLKKLYRRHYTGWGRLSAKLINGIRDKESQKTILDYLISDGRANRNFMQLIHDDGLSFKPIIDKAQAGSHSDNLKEVVGELAGSPAIKKGILQSLKIVDELVKVMGYEPEQVVVEMARENQTTNKGRRNTRQRYKLLEEGVKNLASDLNGNILKEYPTDNQALQNERLFLYYLQNGRDMYTGEALDIDNLSQYDIDHIVPQAFIKDDSIDNRVLVSSAKNRGKSDNVPSIDIVKARKAFWKKLLDAKLMSQRKYDNLTKAERGGLTSDDKARFIQRQLVETRQITKHVARILDERFNNELDSKGRRIRKVKIVTLKSNLVSNFRKEFGFYKIREVNDYHHAHDAYLNAVVAKAILTKYPQLEPEFVYGDYPKYNSYKTRKSATEKLFFYSNIMNFFKTKVTLADGTVVVKDDIEVNNDTGEIVWDKKKHFATVRKVLSYPQVNIVKKTEIQTGGFSKESILAHGNSDKLIPRKTKDIYLDPKKYGGFDSPIVAYSVLVVADIKKGKAQKLKTVTELLGITIMERFRFEKNPSAFLESKGYLNIRDDKLMILPKYSLFELENGRRRLLASAGELQKGNELALPTQYMKFLYLASRYNELKGKPEEIEQKQEFVVQHVSYFDDILQIINDFSNRVILADANLEKINKLYQDNKENISVDELANNIINLFTFTSLGAPAAFKFFDKIVDRKRYTSTKEVLNSTLIHQSITGLYETRIDLGKLGED

SEQ ID NO: 83 - protein, 1370 aa, Streptococcus agalactiae
MNKPYSIGLDIGTNSVGWSIITDDYKVPAKKMRVLGNTDKEYIKKNLIGALLFDGRNTAADRRLKRTARRRYTRRRNRILYLQEIFAEEMSKVDDSFFHRLEDSFLVEEDKRGSKYPIFATLQEEKDYHEKFSTIYHLRKELADKKEKADLRLIYIALAHIIKFRGHFLIEDDSFDVRNTDISKQYQDFLEIFNTTFENNDLLSQNVDVEAILTDKISKSAKKDRILAQYPNQKSTGIFAEFLKLIVGNQADFKKYFNLEDKTPLQFAKDSYDEDLENLLGQIGDEFADLFSAAKKLYDSVLLSGILTVIDLSTKAPLSASMIQRYDEHREDLKQLKQFVKASLPEKYQEIFADSSKDGYAGYIEGKTNQEAFYKYLSKLLTKQEDSENFLEKIKNEDFLRKQRTFDNGSIPHQVHLTELKAIIRRQSEYYPFLKENQDRIEKILTFRIPYYIGPLAREKSDFAWMTRKTDDSIRPWNFEDLVDKEKSAEAFIHRMTNNDFYLPEEKVLPKHSLIYEKFTVYNELTKVRYKNEQGETYFFDSNIKQEIFDGVFKEHRKVSKKKLLDFLAKEYEEFRIVDVIGLDKENKAFNASLGTYHDLEKILDKDFLDNPDNESILEDIVQTLTLFEDREMIKKRLENYKDLFTESQLKKLYRRHYTGWGRLSAKLINGIRDKESQKTILDYLIDDGRSNRNFMQLINDDGLSFKSIISKAQAGSHSDNLKEVVGELAGSPAIKKGILQSLKIVDELVKVMGYEPEQIVVEMARENQTTNQGRRNSRQRYKLLDDGVKNLASDLNGNILKEYPTDNQALQNERLFLYYLQNGRDMYTGEALDIDNLSQYDIDHIIPQAFIKDDSIDNRVLVSSAKNRGKSDDVPSLEIVKDCKVFWKKLLDAKLMSQRKYDNLTKAERGGLTSDDKARFIQRQLVETRQITKHVARILDERFNNELDSKGRRIRKVKIVTLKSNLVSNFRKEFGFYKIREVNNYHHAHDAYLNAVVAKAILTKYPQLEPEFVYGDYPKYNSYKTRKSATEKLFFYSNIMNFFKTKVTLADGTVVVKDDIEVNNDTGEIVWDKKKHFATVRKVLSYPQNNIVKKTEIQTGGFSKESILAHGNSDKLIPRKTKDIYLDPKKYGGFDSPIVAYSVLVVADIKKGKAQKLKTVTELLGITIMERSRFEKNPSAFLESKGYLNIRADKLIILPKYSLFELENGRRRLLASAGELQKGNELALPTQFMKFLYLASRYNESKGKPEEIEKKQEFVNQHVSYFDDILQLINDFSKRVILADANLEKINKLYQDNKENISVDELANNIINLFTFTSLGAPAAFKFFDKIVDRKRYTSTKEVLNSTLIHQSITGLYETRIDLGKLGED

SEQ ID NO: 84 - protein, 1370 aa, Streptococcus agalactiae
MNKPYSIGLDIGTNSVGWSIITDDYKVPAKKMRVLGNTDKEYIKKNLIGALLFDGGNTAADRRLKRTARRRYTRRRNRILYLQEIFAEEMSKVDDSFFHRLEDSFLVEEDKRGSKYPIFATMQEEKYYHEKFPTIYHLRKELADKKEKADLRLIYLALAHIIKFRGHFLIEDDSFDVRNTDIQKQYQAFLEIFDTTFENNDLLSQNVDVEAILTDKISKSAKKDRILARYPNQKSTGIFAEFLKLIVGNQADFKKHFNLEDKTPLQFAKDSYDEDLENLLGQIGDEFADLFSAAKKLYDSVLLSGILTVTDLSTKAPLSASMIQRYDEHREDLKQLKQFVKASLPEKYQEIFADSSKDGYAGYIEGKTNQEAFYKYLSKLLTKQEGSEYLLEKIKNEDFLRKQRTFDNGSIPHQVHLTELRAIIRRQSEYYPFLKENLDRIEKILTFRIPYYVGPLAREKSDFAWMTRKTDDSIRPWNFEDLVDKEKSAEAFIHRMTNNDLYLPEEKVLPKHSLIYEKFTVYNELTKVRFLAEGFKDFQFLNRKQKETIFNSLFKEKRKVTEKDIISFLNKVDGYEGIAIKGIEKQFNASLSTYHDLKKILGKDFLDNTDNELILEDIVQTLTLFEDREMIRKRLDIYKDFFTESQLKKLYRRHYTGWGRLSAKLINGIRNKENQKTILDYLIDDGSANRNFMQLIKDAGLSFKPIIDKARTGSHSDNLKEVVGELAGSPAIKKGILQSLKIVDELVKVMGYEPEQIVVEMARENQTTAKGLSRSRQRLTTLRESLANLKSNILEEKKPKYVKDQVENHHLSDDRLFLYYLQNGKDMYTDDELDIDNLSQYDIDHIIPQAFIKDDSIDNRVLVSSAKNRGKSDDVPSVEIVKDCKVFWKKLLDAKLMSQRKYDNLTKAERGGLTSDDKARFIQRQLVETRQITKHVARILDERFNNELDSKGRRIRKVKIVTLKSNLVSNFRKEFGFYKIREVNNYHHAHDAYLNAVVAKAILTKYPQLEPEFVYGDYPKYNSYKTRKSATEKLFFYSNIMNFFKTKVTLADGTVVVKDDIEVNNDTGEIVWDKKKHFATVRKVLSYPQVNIVKKTEIQTGGFSKESILAHGNSDKLIPRKTKDIYLDPKKYGGFDSPIVAYSVLVVADIKKGKAQKLKTVTELLGITIMERSRFEKNPSAFLESKGYLNIRDDKLMILPKYSLFELENGRRRLLASAGELQKGNELALPTQFMKFLYLASRYNELKGKPEEIEQKQEFVVQHVSYFDDILQIINDFSNRVILADANLEKINKLYQDNKENIPVDELANNIINLFTFTSLGAPAAFKFFDKIVDRKRYTSTKEVLNSTLIHKSITGLYETRIDLGKLGED

SEQ ID NO: 85 - protein, 1370 aa, Streptococcus agalactiae
MNKPYSIGLDIGTNSVGWSIITDDYKVPAKKMRVLGNTDKEYIKKNLIGALLFDGGNTAADRRLKRTARRRYTRRRNRILYLQEIFAEEMSKVDDSFFHRLEDSFLVEEDKRGSKYPIFATLQEEKDYHEKFSTIYHLRKELADKKEKADLRLIYIALAHIIKFRGHFLIEDDSFDVRNTDISKQYQDFLEIFNTTFENNDLLSQNVDVEAILTDKISKSAKKDRILAQYPNQKSTGIFAEFLKLIVGNQADFKKYFNLEDKTPLQFAKDSYDEDLENLLGQIGDEFADLFSAAKKLYDSVLLSGILTVIDLSTKAPLSASMIQRYDEHREDLKQLKQFVKASLPEKYQEIFADSSKDGYAGYIEGKTNQEAFYKYLSKLLTKQEDSENFLEKIKNEDFLRKQRTFDNGSIPHQVHLTELKAIIRRQSEYYPFLKENQDRIEKILTFRIPYYIGPLAREKSDFAWMTRKTDDSIRPWNFEDLVDKEKSAEAFIHRMTNNDFYLPEEKVLPKHSLIYEKFTVYNELTKVRYKNEQGETYFFDSNIKQEIFDGVFKEHRKVSKKKLLDFLAKEYEEFRIVDVIGLDKENKAFNASLGTYHDLEKILDKDFLDNPDNESILEDIVQTLTLFEDREMIKKRLENYKDLFTESQLKKLYRRHYTGWGRLSAKLINGIRDKESQKTILDYLIDDGRSNRNFMQLINDDGLSFKSIISKAQAGSHSDNLKEVVGELAGSPAIKKGILQSLKIVDELVKVMGYEPEQIVVEMARENQTTNQGRRNSRQRYKLLDDGVKNLASDLNGNILKEYPTDNQALQNERLFLYYLQNGRDMYTGEALDIDNLSQYDIDHIIPQAFIKDDSIDNRVLVSSAKNRGKSDDVPSLEIVKDCKVFWKKLLDAKLMSQRKYDNLTKAERGGLTSDDKARFIQRQLVETRQITKHVARILDERFNNELDSKGRRIRKVKIVTLKSNLVSNFRKEFGFYKIREVNNYHHAHDAYLNAVVAKAILTKYPQLEPEFVYGDYPKYNSYKTRKSATEKLFFYSNIMNFFKTKVTLADGTVVIKDDIEVNNDTGEIVWDKKKHFATVRKVLSYPQNNIVKKTEIQTGGFSKESILAHGNSDKLIPRKTKDIYLDPKKYGGFDSPIVAYSVLVVADIKKGKAQKLKTVTELLGITIMERSRFEKNPSAFLESKGYLNIRADKLIILPKYSLFELENGRRRLLASAGELQKGNELALPTQFMKFLYLASRYNESKGKPEEIEKKQEFVNQHVSYFDDILQLINDFSKRVILADANLEKINKLYQDNKENISVDELANNIINLFTFTSLGAPAAFKFFDKIVDRKRYTSTKEVLNSTLIHQSITGLYETRIDLGKLGED

SEQ ID NO: 86 - protein, 1370 aa, Streptococcus agalactiae
MNKPYSIGLDIGTNSVGWSIITDDYKVPAKKMRVLGNTDKEYIKKNLIGALLFDGGNTAADRRLKRTARRRYTRRRNRILYLQEIFAEEMSKVDDSFFHRLEDSFLVEEDKRGSKYPIFATLQEEKDYHEKFSTIYHLRKELADKKEKADLRLIYIALAHIIKFRGHFLIEDDSFDVRNTDISKQYQDFLEIFNTTFENNDLLSQNVDVEAILTDKISKSAKKDRILAQYPNQKSTGIFAEFLKLIVGNQADFKKYFNLEDKTPLQFAKDSYDEDLENLLGQIGDEFADLFSAAKKLYDSVLLSGILTVIDLSTKAPLSASMIQRYDEHREDLKQLKQFVKASLPEKYQEIFADSSKDGYAGYIEGKTNQEAFYKYLSKLLTKQEDSENFLEKIKNEDFLRKQRTFDNGSIPHQVHLTELKAIIRRQSEYYPFLKENQDRIEKILTFRIPYYIGPLAREKSDFAWMTRKTDDSIRPWNFEDLVDKEKSAEAFIHRMTNNDFYLPEEKVLPKHSLIYEKFTVYNELTKVRYKNEQGETYFFDSNIKQEIFDGVFKEHRKVSKKKLLDFLAKEYEEFRIVDVIGLDKENKAFNASLGTYHDLEKILDKDFLDNPDNESILEDIVQTLTLFEDREMIKKRLENYKDLFTESQLKKLYRRHYTGWGRLSAKLINGIRDKESQKTILDYLIDDGRSNRNFMQLINDDGLSFKSIISKAQAGSHSDNLKEVVGELAGSPAIKKGILQSLKIVDELVKVMGYEPEQIVVEMARENQTTNQGRRNSRQRYKLLDDGVKNLASDLNGNILKEYPTDNQALQNERLFLYYLQNGRDMYTGEALDIDNLSQYDIDHIIPQAFIKDDSIDNRVLVSSAKNRGKSDDVPSLEIVKDCKVFWKKLLDAKLMSQRKYDNLTKAERGGLTSDDKARFIQRQLVETRQITKHVASILDERFNNELDSKGRRIRKVKIVTLKSNLVSNFRKEFGFYKIREVNNYHHAHDAYLNAVVAKAILTKYPQLEPEFVYGDYPKYNSYKTRKSATEKLFFYSNIMNFFKTKVTLADGTVVVKDDIEVNNDTGEIVWDKKKHFATVRKVLSYPQNNIVKKTEIQTGGFSKESILAHGNSDKLIPRKTKDIYLDPKKYGGFDSPIVAYSVLVVADIKKGKAQKLKTVTELLGITIMERSRFEKNPSAFLESKGYLNIRADKLIILPKYSLFELENGRRRLLASAGELQKGNELALPTQFMKFLYLASRYNESKGKPEEIEKKQEFVNQHVSYFDDILQLINDFSKRVILADANLEKINKLYQDNKENISVDELANNIINLFTFTSLGAPAAFKFFDKIVDRKRYTSTKEVLNSTLIHQSITGLYETRIDLGKLGED

SEQ ID NO: 87 - protein, 1370 aa, Streptococcus agalactiae
MNKPYSIGLDIGTNSVGYSVVTDDYKVPAKKMRVLGNTDKEYIKKNLIGALLFDGGNTASDRRLKRTARRRYTRRRNRILYLQEIFAEEMSKVDDSFFHRLEDSFLVEDDKRGSKYPIFATMQEEKDYHEKFPTIYHLRKELADKKEKANLRLVYLALAHIIKFRGHFLIEDDSFDVRNTDIQRQYQAFLEIFDTTFENNHLLSQNIDVEGILTDKISKSAKKDRILAQYPNQKSTGIFAEFLKLIVGNQADFKKHFNLEDKTPLQFAKDSYDEDLENLLGQIGDEFADLFSVAKKLYDSVLLSGILTVTDLSTKAPLSASMIQRYDEHREDLKQLKQFVKASLPEKYQEIFTDSSKDGYAGYIESKTNQGAFYKYLSKLLTKQEGSEYFLEKIKNEDFLRKQRTFDNGSIPHQVHLTELKAIIRRQSEYYPFLKENLDRIEKILTFRIPYYVGPLAREKSDFAWMTRKTDDSIRPWNFEELVDKEASAEAFIHRMTNNDLYLPEEKVLPKHSLIYEKFTVYNELTKVRYKNEQGETYFFDSNIKQEIFDGVFKEHRKVSKKKLLDFLAKEYEEFRIVDVIGLDKENKAFNASLGTYHDLKKILDKDFLDNPDNESILEDIVQTLTLFEDREMIKKRLENYKDLFTESQLKKLYRRHYTGWGRLSAKLINGIRDKESQKTILDYLISDGRANRNFMQLIHDDGLSFKPIIDKAQAGSHSDNLKEVVGELAGSPAIKKGILQSLKIVDELVKVMGYEPEQVVVEMARENQTTNQGRRNTRQRYKLLEEGVKNLASDLNGNILKEYPTDNQALQNERLFLYYLQNGRDMYTGEALDIDNLSQYDIDHIVPQAFIKDDSIDNRVLVSSAKNRGKSDNVPSIDIVKARKAFWKKLLDAKLMSQRKYDNLTKAERGGLTSDDKARFIQRQLVETRQITKHVARILDERFNNELDSKGRRIRKVKIVTLKSNLVSNFRKEFGFYKIREVNDYHHAHDAYLNAVVAKAILTKYPQLEPEFVYGDYPKYNSYKTRKSATEKLFFYSNIMNFFKTKVTLADGTVVVKDDIEVNNDTGEIVWDKKKHFATVRKVLSYPQVNIVKKTEIQTGGFSKESILAHGNSDKLIPRKTKDIYLDPKKYGGFDSPIVAYSVLVVADIKKGKAQKLKTVTELLGITIMERFRFEKNPSAFLESKGYLNIRDDKLMILPKYSLFELENGRRRLLASAGELQKGNELALPTQYMKFLYLASRYNELKGKPEEIEQKQEFVVQHVSYFDDILQIINDFSNRVILADANLEKINKLYQDNKENISVDELANNIINLFTFTSLGAPAAFKFFDKIVDRKRYTSTKEVLNSTLIHQSITGLYETRIDLGKLGED

SEQ ID NO: 88 - protein, 1370 aa, Streptococcus agalactiae
MNKPYSIGLDIGTNSVGWSIITDDYKVPAKKMRVLGNTDKEYIKKNLIGALLFDGGNTAADRRLKRTARRRYTRRRNRILYLQEIFAEEMSKVDDSFFHRLEDSFLVEEDKRGSKYPIFATLQEEKDYHEKFSTIYHLRKELADKKEKADLRLIYIALAHIIKFRGHFLIEDDSFDVRNTDISKQYQDFLEIFNTTFENNDLLSQNVDVEAILTDKISKSAKKDRILAQYPNQKSTGIFAEFLKLIVGNQADFKKYFNLEDKTPLQFAKDSYDEDLENLLGQIGDEFADLFSAAKKLYDSVLLSGILTVIDLSTKAPLSASMIQRYDEHREDLKQLKQFVKASLPEKYQEIFADSSKDGYAGYIEGKTNQEAFYKYLSKLLTKQEDSENFLEKIKNEDFLRKQRTFDNGSIPHQVHLTELKAIIRRQSEYYPFLKENQDRIEKILTFRIPYYIGPLAREKSDFAWMTRKTDDSIRPWNFEDLVDKEKSAEAFIHRMTNNDFYLPEEKVLPKHSLIYEKFTVYNELTKVRYKNEQGETYFFDSNIKQEIFDGVFKEHRKVSKKKLLDFLAKEYEEFRIVDVIGLDKENKAFNASLGTYHDLEKILDKDFLDNPDNESILEDIVQTLTLFEDREMIKKRLENYKDLFTESQLKKLYRRHYTGWGRLSAKLINGIRDKESQKTILDYLIDDGRSNRNFMQLINDDGLSFKSIISKAQAGSHSDNLKEVVGELAGSPAIKKGILQSLKIVDELVKVMGYEPEQIVVEMARENQTTNQGRRNSRQRYKLLDDGVKNLASDLNGNILKEYPTDNQALQNERLFLYYLQNGRDMYTGEALDIDNLSQYDIDHIIPQAFIKDDSIDNRVLVSSAKNRGKSDDVPSLEIVKDCKVFWKKLLDAKLMSQRKYDNLTKAERGGLTSDDKARFIQRQLVETRQITKHVARILDERFNNELDSKGRRIRKVKIVTLKSNLVSNFRKEFGFYKIREVNNYHHAHDAYLNAVVAKAILTKYPQLEPEFVYGDYPKYNSYKTRKSATEKLFFYSNIMNFFKTKVTLADGTVVVKDDIEVNNDTGEIVWDKKKHFATVRKVLSYPQNNIVKKTEIQTGGFSKESILAHGNSDKLIPRKTKDIYLDPKKYGGFDSPIVAYSVLVVADIKKGKAQKLKTVTELLGITIMERSRFEKNLSAFLESKGYLNIRADKLIILPKYSLFELENGRRRLLASAGELQKGNELALPTQFMKFLYLASRYNESKGKPEEIEKKQEFVNQHVSYFDDILQLINDFSKRVILADANLEKINKLYQDNKENISVDELANNIINLFTFTSLGAPAAFKFFDKIIDRKRYTSTKEVLNSTLIHQSITGLYETRIDLGKLGED

SEQ ID NO: 89 - protein, 1370 aa, Streptococcus agalactiae
MNKPYSIGLDIGTNSVGWSIITDDYKVPAKKMRVLGNTDKEYIKKNLIGALLFDGGNTAADRRLKRTARRRYTRRRNRILYLQEIFAEEMSKVDDSFFHRLEDSFLVEEDKRGSKYPIFATLQEEKDYHEKFSTIYHLRKELADKKEKADLRLIYIALAHIIKFRGHFLIEDDSFDVRNTDISKQYQDFLEIFNTTFENNDLLSQNVDVEAILTDKISKSAKKDRILAQYPNQKSTGIFAEFLKLIVGNQADFKKYFNLEDKTPLQFAKDSYDEDLENLLGQIGDEFADLFSAAKKLYDSVLLSGILTVIDLSTKAPLSASMIQRYDEHREDLKQLKQFVKASLPEKYQEIFADSSKDGYAGYIEGKTNQEAFYKYLSKLLTKQEDSENFLEKIKNEDFLRKQRTFDNGSIPHQVHLTELKDIIRRQSEYYPFLKENQDRIEKILTFRIPYYIGPLAREKSDFAWMTRKTDDSIRPWNFEDLVDKEKSAEAFIHRMTNNDFYLPEEKVLPKHSLIYEKFTVYNELTKVRYKNEQGETYFFDSNIKQEIFDGVFKEHRKVSKKKLLDFLAKEYEEFRIVDVIGLDKENKAFNASLGTYHDLEKILDKDFLDNPDNESILEDIVQTLTLFEDREMIKKRLENYKDLFTESQLKKLYRRHYTGWGRLSAKLINGIRDKESQKTILDYLIDDGRSNRNFMQLINDDGLSFKSIISKAQAGSHSDNLKEVVGELAGSPAIKKGILQSLKIVDELVKVMGYEPEQIVVEMARENQTTNQGRRNSRQRYKLLDDGVKNLASDLNGNILKEYPTDNQALQNERLFLYYLQNGRDMYTGEALDIDNLSQYDIDHIIPQAFIKDDSIDNRVLVSSAKNRGKSDDVPSLEIVKDCKVFWKKLLDAKLMSQRKYDNLTKAERGGLTSDDKARFIQRQLVETRQITKHVARILDERFNNELDSKGRRIRKVKIVTLKSNLVSNFRKEFGFYKIREVNNYHHAHDAYLNAVVAKAILTKYPQLEPEFVYGDYPKYNSYKTRKSATEKLFFYSNIMNFFKTKVTLADGTVVVKDDIEVNNDTGEIVWDKKKHFATVRKVLSYPQNNIVKKTEIQTGGFSKESILAHGNSDKLIPRKTKDIYLDPKKYGGFDSPIVAYSVLVVADIKKGKAQKLKTVTELLGITIMERSRFEKNPSAFLESKGYLNIRADKLIILPKYSLFELENGRRRLLASAGELQKGNELALPTQFMKFLYLASRYNESKGKPEEIEKKQEFVNQHVSYFDDILQLINDFSKRVILADANLEKINKLYQDNKENISVDELANNIINLFTFTSLGAPAAFKFFDKIVDRKRYTSTKEVLNSTLIHQSITGLYETRIDLGKLGED

SEQ ID NO: 90 - protein, 1370 aa, Streptococcus agalactiae
MNKPYSIGLDIGTNSVGWSIITDDYKVPAKKMRVLGNTDKEYIKKNLIGALLFDGGNTAADRRLKRTARRRYTRRRNRILYLQEIFAEEMSKVDDSFFHRLEDSFLVEEDKRGSKYPIFATMQEEKDYHEKFPTIYHLRKELADKKEKADLRLVYLALAHIIKFRGHFLIEDDRFDVRNTDIQKQYQAFLEIFDTSFENNHLLSQNVDVEAILTDKISKSAKKDRILAQYPNQKSTGIFAEFLKLIVGNQADFKKHFNLEDKTPLQFAKDSYDEDLENLLGQIGDEFADLFSAAKKLYDSVLLSGILTVTDLSTKAPLSASMIQRYDEHREDLKQLKQFVKASLPEKYQEIFADSSKDGYAGYIEGKTNQEAFYKYLSKLLTKQEDSEYFLEKIKNEDFLRKQRTFDNGSIPHQVHLTELKAIIRRQSEYYPFLKENQDKIEKILTFRIPYYVGPLARGNSDFAWMTRKTDDSIRPWNFEDLVDKEKSAEAFIHRMTNNDLYLPEEKVLPKHSLIYEKFTVYNELTKVRYKNEQGETYFFDSNVKQEIFDGVFKEHRKVSKKQLLDFLAKEFEEFRIVDVTGLDKENKAFNASLGTYHDLKKILDKDFLDNPDNESILEDIVQTITLFEDREMIKKRLENYKDLFTESQLKKLYRRHYTGWGRLSAKLINGIRDRESQKIILDYLISDGRANRNFMQLINDDGLSFKSIISKAQSGSHSDNLKEVVGELAGSPAIKKGILQSLKIVDELVKVMGYEPEQIVVEMARENQTTNQGRRNSRQRYKLLEDGVKNLASDLNGDILKEYPTDNQALQNERLFLYYLQNGRDMYTGEALDIDSLSQYDIDHIVPQAFIKDDSIDNRVLVSSAKNRGKSDDVPSIDIVKARKAFWKKLLDAKLISQRKYDNLTKAERGGLTPDDKAGFIQRQLVETRQITKHVARILDERFNNKVDDNNKPIRKVKIVTLKSNLVSNFRKEFGFYKIREVNNYHHAHDAYLNAVVAKAILTKYPQLEPEFVYGDYPKYNSYKTRKSATEKLFFYSNIMNFFKTKVTLADETVVVKDDIEVNNETGEIAWDKKKHFATVRKVLSYPQVNIVKKTEVQTGGFSKESILAHSNSDKLIPRKTKDIYLDPKKYGGFDSPIVAYSVLVLADIKKGKAQKLKTVKELIGITIMERERFEKNPSAFLESKGYLNIRTDKLIILPKYSLFELENGRRRLLASAGELQKGNELALPTQYMKFLYLASRYNESKGKPEEIEKKQEFVNQHVSYFDDILQLINDFSKRVILADANLEKINKLYSDNKDNTPVDELAKNIINLFTFTSLGAPAAFKFFDKSVDRKRYTSTKEVLDSTLIHQSITGLYETRIDLGKLGED

SEQ ID NO: 91 - protein, 1370 aa, Streptococcus agalactiae
  misc_feature (9)..(9): Xaa can be any naturally occurring amino acid
MNKPYSIGXDIGTNSVGWSIITDDYKVPAKKMRVLGNTDKEYIKKNLIGALLFDGGNTAADRRLKRTARRRYTRRRNRILYLQEIFAEEMSKVDDSFFHRLEDSFLVEEDKRGSKYPIFATLQEEKDYHEKFSTIYHLRKELADKKEKADLRLIYIALAHIIKFRGHFLIEDDSFDVRNTDISKQYQDFLEIFNTTFENNDLLSQNVDVEAILTDKISKSAKKDRILAQYPNQKSTGIFAEFLKLIVGNQADFKKYFNLEDKTPLQFAKDSYDEDLENLLGQIGDEFADLFSAAKKLYDSVLLSGILTVIDLSTKAPLSASMIQRYDEHREDLKQLKQFVKASLPEKYQEIFADSSKDGYAGYIEGKTNQEAFYKYLSKLLTKQEDSENFLEKIKNEDFLRKQRTFDNGSIPHQVHLTELKAIIRRQSEYYPFLKENQDRIEKILTFRIPYYIGPLAREKSDFAWMTRKTDDSIRPWNFEDLVDKEKSAEAFIHRMTNNDFYLPEEKVLPKHSLIYEKFTVYNELTKVRYKNEQGETYFFDSNIKQEIFDGVFKEHRKVSKKKLLDFLAKEYEEFRIVDVIGLDKENKAFNASLGTYHDLEKILDKDFLDNPDNESILEDIVQTLTLFEDREMIKKRLENYKDLFTESQLKKLYRRHYTGWGRLSAKLINGIRDKESQKTILDYLIDDGRSNRNFMQLINDDGLSFKSIISKAQAGSHSDNLKEVVGELAGSPAIKKGILQSLKIVDELVKVMGYEPEQIVVEMARENQTTNQGRRNSRQRYKLLDDGVKNLASDLNGNILKEYPTDNQALQNERLFLYYLQNGRDMYTGEALDIDNLSQYDIDHIIPQAFIKDDSIDNRVLVSSAKNRGKSDDVPSLEIVKDCKVFWKKLLDAKLMSQRKYDNLTKAERGGLTSDDKARFIQRQLVETRQITKHVARILDERFNNELDSKGRRIRKVKIVTLKSNLVSNFRKEFGFYKIREVNNYHHAHDAYLNAVVAKAILTKYPQLEPEFVYGDYPKYNSYKTRKSATEKLFFYSNIMNFFKTKVTLADGTVVVKDDIEVNNDTGEIVWDKKKHFATVRKVLSYPQNNIVKKTEIQTGGFSKESILAHGNSDKLIPRKTKDIYLDPKKYGGFDSPIVAYSVLVVADIKKGKAQKLKTVTELLGITIMERSRFEKNPSAFLESKGYLNIRADKLIILPKYSLFELENGRRRLLASAGELQKGNELALPTQFMKFLYLASRYNESKGKPEEIEKKQEFVNQHVSYFDDILQLINDFSKRVILADANLEKINKLYQDNKENISVDELANNIINLFTFTSLGAPAAFKFFDKIVDRKRYTSTKEVLNSTLIHQSITGLYETRIDLGKLGED

SEQ ID NO: 92 - protein, 1370 aa, Streptococcus agalactiae
MNKPYSIGLDIGTNSVGWSIITDDYKVPAKKMRVLGNTDKEYIKKNLIGALLFDGGNTAADRRLKRIARRRYTRRRNRILYLQEIFAEKMSKVDDSFFHRLEDSFLVEEDKRGSKYPIFATLQEEKDYHEKFPTIYHLRKELADKKEKADLRLVYLALAHIIKFRGHFLIEDDRFDVRNTDIQKQYQAFLEIFDTTFENNHLLSQNVDVEAILTDKISKSAKKDRILAQYPDQKSTGIFAEFLKLIVGNQADFKKHFNLEDKTPLQFAKDSYDEDLENLLGQIGDEFADLFSAAKKLYDSVLLSGILTVTDLSTKAPLSASMIQRYDEHREDLKQLKQFVKASLPEKYQEIFADSSKDGYAGYIEGKTNQEAFYKYLSKLLTKQEGSEYLLEKIKNEDFLRKQRTFDNGSIPHQVHLTELRAIIRRQSEYYPFLKENLDRIEKILTFRIPYYVGPLAREKSDFAWMTRKTDDSIRPWNFEELVDKEASAEAFIHCMTNNDLYLPEEKVLPKHSLIYEKFTVYNELTKVRYKNEQGETYFFDSNIKQEIFDGVFKEYRKVSKKQLLDFLAKEFEEFRIVDVTGLDKENKAFNASLGTYHDLEKILGKDFLDNPDNESILEDIVQTLTLFEDREMIKKRLDIYKDFFTESQLKKLYRRHYTGWGRLSAKLINGIRNKENQKTILDYLIDDGSANRNFMQLIKDAGLSFKSIISKAQSGSHSDNLKEVVSELAGSPAIKKGILQSLKIVDELVKVMGYKPEQIVVEMARENQTTNQGRRNSRQRYKLLDDGVRNLASDLNGNILKEYPTDNQALQNERLFLYYLQNGRDMYTEKALDIDNLSQYDIDHIIPQAFIKDDSIDNRVLVSSAKNRGKSDDVPSLEIVKDCKVFWKKLLDAKLMSQRKYDNLTKAERGGLTSDDKARFIQRQLVETRQITKHVARILDERFNNELDSKGRRIRKVKIVTLKSNLVSNFRKEFGFYKIREVNDYHHAHDAYLNAVVAKAILTKYPQLEPEFVYGDYPKYNSYKTRKSATEKLFFYSNIMNFFKTKVTLADGTVVVKDDIEVNNDTGEIVWDKKKHFATVRKVLSYPQNNIVKKTEIQTGGFSKESILAHGNSDKLIPRKTKDIYLDPKKYGGFDSPIVAYSVLVVADIKKGKAQKLKTVTELLGITIMERSRFEKNPSAFLESKGYLNIRTDKLIILPKYSLFELENGRRRLLASAGELQKGNELALPTQFMKFLYLASRYNESKGKPEEIEKKQEFVNQHVSYFDDILQIINDFSNRVILADANLEKINKLYQDNKENISVDELANNIINLFTFTSLGAPAAFKFFDKIVDRKRYTSTKEVLNSTLIHQSITGLYETRIDLGKLGED

SEQ ID NO: 93 - protein, 1386 aa, Streptococcus agalactiae
MNQKYSIGLDIGTNSVGWAVITDDYKVPAKKMKVLGNTDKQSIKKNLLGALLFDSGETAEATRLKRTARRRYTRRRNRLRYLQEIFAEEMMQVDESFFQRLDDSFLVDEDKRGERHPIFGNIAAEVKYHDEFPTIYHLRKHLADISQKADLRLVYLALAHMIKFRGHFLIEGQLKAENTNVQALFKDFVEVYDKTVEESHLSEITVDALSILTEKVSKSRRLENLIAHYPAEKKNTLFGNLIALFLGLQPNFKTNFQLSEDAKLQFSKDTYEEDLEGLLGEVGDEYADLFASAKNLYDAILLSGILTVDDNSTKAPLSASMVKRYEEHQKDLKKFEDFIKVNALDQYNAIFKDKNKKGYAGYIESGVKQDEFYKYLKGILLQINGSGDFLDKIDREDFLRKQRTFDNGSIPHQIHLQEMHAILRRQGEHYPFLKENQDKIEKILTFRIPYYVGPLARKGSRFAWAEYKADEKITPWNFDDILDKEKSAEKFITRMTLNDLYLPEEKVLPKHSLLYETFTVYNELTKVKYVNEQGEAKFFDANMKQEIFDHVFKENRKVTKDKLLNYLNKEFEEFRIVNLTGLDKENKVFNSSLGTYHDLRKILNKSFLDNKENAQIIEDIIQTLTLFEDREMIRQRLQKYSDIFTKAQLKKLERRHYTGWGRLSYKLINGIRNKENKKTILDYLIDDGYANRNFMQLINDDALSFKEEIAKAQIIGDVDDIANVVHDLPGSPAIKKGILQSVKIVDELVKVMGHNPANIIIEMARENQTTDRGRRNSQQRLKLLQDSLKNLDNPVNIKNVENQQLQNDRLFLYYIQNGKDMYTGETLDINNLSQYDIDHIIPQAYIKDDSFDNRVLTSSSENRGKSDNVPSIEVVCARKADWMRLRKAGLISQRKFDNLTKAERGGLTENDKAGFIKRQLVETRQITKHVAQVLDARFNAKHDENKKVIRDVKIITLKSNLVSQFRKDFKFYKVREINDYHHAHDAYLNAVIGTALLKKYPKLASEFVYGEFKKYDVRKFIAKSDKEIGKATAKYFFYSNLMNFFKKEVKFADGTVVERPDIETSEDGEIAWNKQTDFKIVRKVLSYPQVNIVKKTEVQTHGLDRGKPRGLFNANPSPKPKPDSSENLVGVKRNLDPKKYGGYAGISNSYAVLVKAIIEKGVKKKETMVLEFQGISILDRITFEKDKRAFLLGKGYKDIKKIIELPKYSLFELKDGSRRMLASILSTNNKRGEIHKGNELFVPQKFTTLLYHAKRINNPINKDHIEYVKKHRDDFKELLNYVLEFNEKYVGATKNGERLKEAVADFDSKSNEEICTSFLGAVNSKNAGLFELTSLGSASDFEFLGVKIPRYRDYTPSSLLKDSTLIHQSITGLYETRIDLSKLGED

SEQ ID NO: 94 - protein, 1346 aa, Streptococcus agalactiae
MMKKEYSIGLDIGTNSVGWAVITDDYKVPAKKMKVLGNTDKQSIKKNLLGALLFDSGETAEATRLKRTARRRYTRRKNRLRYLQEIFTEEMNKVDENFFQRLDDSFLVEEDKQGSKYPIFGTLKEEKEYHKKFKTIYHLREELANSKEKADLRLVYLALAHMIKFRGHFLYEGDLKAENTDVQALFKDFVEEYDKTIEESHLSEITVDALSILTEKVSKSSRLENLIAHYPTEKKNTLFGNLIALSLGLQPNFKTNFQLSEDAKLQFSKDTYEEDLEELLGEIGDEYADLFASAKNLYDAILLSGILAVDDNTTKAPLSASMVKRYEEHQKDLKKLKDFIKVNAPDQYNAIFKDKNKKGYAGYIESGVEQDEFYKYLKGILLKINGSGDFLDKIDCEDFLRKQRTFDNGSIPHQIHLQEMHAILRRQGEHYPFLKENQDKIEKILTFRIPYYVGPLARKGSRFAWAEYKADEKITPWNFDDILDKEKSAEKFITRMTLNDLYLPEEKVLPKHSPLYETFTVYNELTKVKYVNEQGEAKFFDTNMKQEIFDHVFKENRKVTKDKLLNYLNKEFEEFRIVNLTGLDKENKAFNSSLGTYHDLRKILDKSFLDDKANEKTIEDIIQTLTLFEDREMIRQRLQKYSDIFTKAQLKKLERRHYTGWGRLSYKLINGIRNKENKKTILDYLIDDGYANRNFMQLINDDALSFKEEIARAQIIGDVDDIANVVHDLPGSPAIKKGILQSVKIVDELVKVMGHNPANIIIEMARENQTTDKGRRNSQQRLKLLQDSLKNLDNPVNIKNVENQQLQNDRLFLYYIQNGKDMYTGETLDINNLSQYDIDHIIPQAFIKDNSLDNRVLTRSDKNRGKSDDVPSIEVVHEMKSFWSKLLSVKLITQRKFDNLTKAERGGLTEEDKAGFIKRQLVETRQITKHVAQILDERFNTEFDGAQRRIRNVKIITLKSNLVSNFRKEFELYKVREINDYHHAHDAYLNAVVGNALLLKYPQLEPEFVYGEYPKYNSYRSRKSATEKFLFYSNILRFFKKEDIQTNEDGEIAWNKEKHIKILRKVLSYPQVNIVKKTEEQTGGFSKESILPKGESDKLIPRKTKNSYWNPKKYGGFDSPVVAYSILVFADVEKGKSKKLRKVQDMVGITIMEKKRFEKNPVDFLEQRGYRNVRLEKIIKLPKYSLFELENKRRRLLASARELQKGNELVIPQRFTTLLYHSYQIEKNYEPEHREYVEKHKDEFKELLEYISVFSRKYVLADNNLTKIEMLFSKNKDAEVSSLAKSFISLLTFTAFGAPAAFNFFGENIDRKRYTSVTECLNATLIHQSITGLYETRIDLSKLGED

SEQ ID NO: 95 - protein, 1346 aa, Streptococcus agalactiae
MMKKEYSIGLDIGTNSVGWAVITDDYKVPAKKMKVLGNTDKQSIKKNLLGALLFDSGETAEATRLKRTARRRYTRRRNRLRYLQEIFAEEMMQVDESFFQRLDDSFLVEEDKRGSRYPIFGNIAAEVKYHDDFPTIYHLRKHLVDISQKADLRLVYLALAHMIKFRGHFLIEGQLKAENTNVQALFKDFVEVYDKTVEESHLSEMTVDALSILTEKVSKSRRLENLVECYPTEKKNTLFGNLIALSLGLQPNFKTNFQLSEDAKLQFSKDTYEEDLEGLLGEIGDEYADLFASAKNLYDAILLSGILAVDDNTTKAPLSASMVKRYEEHQKDLKKLKDFIKVNAPAQYDDIFKDETKNGYAGYIENGVKQDEFYKYLKNTLSKIDGSDYFLDKIDREDFLRKQRTFDNGSIPHQIHLQEMHAILRRQGEHYPFLKENQDKIEKILTFRIPYYVGPLARKGSRFAWAEYKADEKITPWNFDDILDKEKSAEKFITRMTLNDLYLPEEKVLPKHSPLYETFTVYNELTKVKYVNEQGEAKFFDTNMKQEIFDHVFKENRKVTKDKLLNYLNKEFEEFRIVNLTGLDKENKAFNASLGTYHDLRKILDKSFLDDKVNEKIIEDIIQTLTLFEDREMIRQRLQKYSDIFTTQQLKKLERRHYTGWGRLSYKLINGIRNKENKKTILDYLIDDGYANRNFMQLINDDALSFKEEIARAQIIGDVDDIANVVHDLPGSPAIKKGILQSVKIVDELVKVMGHNPANIIIEMARENQTTDKGRRNSQQRLKLLQDSLKNLDNPVNIKNVENQQLQNDRLFLYYIQNGKDMYTGETLDINNLSQYDIDHIIPQAFIKDNSLDNRVLTRSDKNRGKSDDVPSIEVVHEMKSFWSKLLSVKLITQRKFDNLTKAERGGLTEEDKAGFIKRQLVETRQITKHVAQILDERFNTEFDGAQRRIRNVKIITLKSNLVSNFRKEFELYKVREINDYHHAHDAYLNAVVGNALLLKYPQLEPEFVYGEYPKYNSYRSRKSATEKFLFYSNILRFFKKEDIQTNEDGEIAWNKEKHIKILRKVLSYPQVNIVKKTEEQTGGFSKESILPKGESDKLIPRKTKNSYWNPKKYGGFDSPVVAYSILVFADVEKGKSKKLRKVQDMVGITIMEKKRFEKHPVDFLEQRGYRNVRLEKIIKLPKYSLFELENKRRRLLASARELQKGNELVIPQRFTTLLYHSYRIEKDYEPEHREYVEKHKDEFKELLEYISVFSRKYVLADNNLTKIEMLFSKNKDAEVSSLAKSFISLLTFTAFGAPAAFNFFGENIDRKRYTSVTECLNATLIHQSITGLYETRIDLSKLGED

SEQ ID NO: 96 - protein, 1345 aa, Streptococcus agalactiae
MKKEYSIGLDIGTNSVGWAVITDDYKVPAKKMKVLGNTDKQSIKKNLLGALLFDSGETAEATRLKRTARRRYTRRKNRLRYLQEIFTEEMNKVDENFFQRLDDSFLVEEDKQGSKYPIFGTLKEEKEYHKKFKTIYHLREELANSKEKADLRLVYLALAHMIKFRGHFLYEGDLKAENTDVQALFKDFVEEYDKTIEESHLSEITVDALSILTEKVSKSSRLENLIAHYPTEKKNTLFGNLIALSLGLQPNFKTNFQLSEDAKLQFSKDTYEEDLEELLGEIGDEYADLFASAKNLYDAILLSGILAVDDNTTKAPLSASMVKRYEEHQKDLKKLKDFIKVNAPDQYNAIFKDKNKKGYAGYIESGVEQDEFYKYLKGILLKINGSGDFLDKIDCEDFLRKQRTFDNGSIPHQIHLQEMHAILRRQGEHYPFLKENQDKIEKILTFRIPYYVGPLARKGSRFAWAEYKADEKITPWNFDDILDKEKSAEKFITRMTLNDLYLPEEKVLPKHSPLYETFTVYNELTKVKYVNEQGEAKFFDTNMKQEIFDHVFKENRKVTKDKLLNYLNKEFEEFRIVNLTGLDKENKAFNSSLGTYHDLRKILDKSFLDDKANEKTIEDIIQTLTLFEDREMIRQRLQKYSDIFTKAQLKKLERRHYTGWGRLSYKLINGIRNKENKKTILDYLIDDGYANRNFMQLINDDALSFKEEIARAQIIGDVDDIANVVHDLPGSPAIKKGILQSVKIVDELVKVMGHNPANIIIEMARENQTTDKGRRNSQQRLKLLQDSLKNLDNPVNIKNVENQQLQNDRLFLYYIQNGKDMYTGETLDINNLSQYDIDHIIPQAFIKDNSLDNRVLTRSDKNRGKSDDVPSIEVVHEMKSFWSKLLSVKLITQRKFDNLTKAERGGLTEEDKAGFIKRQLVETRQITKHVAQILDERFNTEFDGAQRRIRNVKIITLKSNLVSNFRKEFELYKVREINDYHHAHDAYLNAVVGNALLLKYPQLEPEFVYGEYPKYNSYRSRKSATEKFLFYSNILRFFKKEDIQTNEDGEIAWNKEKHIKILRKVLSYPQVNIVKKTEEQTGGFSKESILPKGESDKLIPRKTKNSYWNPKKYGGFDSPVVAYSILVFADVEKGKSKKLRKVQDMVGITIMEKKRFEKNPVDFLEQRGYRNVRLEKIIKLPKYSLFELENKRRRLLASARELQKGNELVIPQRFTTLLYHSYQIEKNYEPEHREYVEKHKDEFKELLEYISVFSRKYVLADNNLTKIEMLFSKNKDAEVSSLAKSFISLLTFTAFGAPAAFNFFGENIDRKRYTSVTECLNATLIHQSITGLYETRIDLSKLGED

SEQ ID NO: 97 - protein, 1377 aa, Streptococcus caballi
MTKKNYSIGLDIGTNSVGWAVITDDYKVPAKKMKVLGNTDKKYIKKNLLGALLFDSGETAEATRLKRTARRRYTRRKNRLRYLQDIFTEEMAKVDDSFFQRLDESFLTDNDKNFDSHPIFGNKAEEDAYHQKFPTIYHLRKHLADSTEKADLRLVYLALAHMIKFRGHFLIEGELNAENTDVQKLFTDFVGVYDRTFDDSHLSEITVDAASILTEKISKSRRLENLINNYPKEKKNTLFGNLIALALGLQPNFKTNFKLSEDAKLQFSKDTYEEDLEELLGKIGDDYADLFTSSKNLYDAILLSGILTVDDNSTKAPLSASMIKRYVEHHEDLEKLKEFIKANKSELYHDIFKDKTQNGYAGYIENGVKQDEFYKYLKGILTKINGSDYFLDKIEREDFLRKQRTFDNGSIPHQIHLQEMHAILRRQGDYYPFLKENQEEIEKILTFRIPYYVGPLARKDSRFAWAEYRSDEKITPWNFDKVIDKEKSAEKFITRMTLNDLYLPEEKVLPKHSHVYETFAVYNELTKVKYVNEQGKDSFFDSNMKQEIFDHVFKENRKVTKEKLLNYLDKEFPEYRIQDLVGLDKENKSFNASLGTYHDLKKILDKSFLDDKVNEEVIEDIIKTLTLFEDREMIQQRLQKYSDIFTKQQLKKLERRHYTGWGRLSYKLINGIRNKENNKTILDYLIDDGSANRNFMQLINDDALSFKQIIQEAQVVGDVDDIETVVHDLPGSPAIKKGILQSVKIVDELIKVMGDNPDNIVIEMARENQTTNRGRSQSQQRLKKLQNSLKELGSNILNEEKPSYIEDKVENSHLQNDQLFLYYIQNGKDMYTGDELDIDHLSDYDIDHIIPQAFIKDDSIDNRVLTSSAKNRGKSDDVPSLGIVRARKAEWVRLYKSGLISKRKFDNLTKAERGGLTEADKAGFIKRQLVETRQITKHVAQILDARFNTERDENDKVIRDVKVITLKSNLVSQFRKEFKFYKVREINDYHHAHDAYLNAVVGTALLKKYPKLAPEFVYGEYKKYDVRKLVAKSSDDHSEMGKATAKYFFYSNLMNFFKRVIRYSNGKVIVRPVVEYSKDTGEIAWNKRTDFEKVRKVLSYPQVNIVKKVETQTGGFSKESILPKGDSDKLIPRKTKKVLWEPKKYGGFDSPTVAYSVLVVADVEKGKTKKLKTVKELVGISIMERSFFEKNPVEFLKNKGYQNVQEDKLMKLPKYSLFEFEGGRRRLLASATELQKGNEIMLSAHLVALLYHAHRIGNFNSAEHLKYVSEHKKEFEEVLSCVENFANVYVDVEKNLSKIRAAADSMDNFSIEEISDSFINLLTLTALGAPADFNFLGEKIPRKRYNSTKECLNATLIHQSITGLYETRIDLSKLGEE

SEQ ID NO: 98 - protein, 1375 aa, Streptococcus canis
MEKKYSIGLDIGTNSVGWAVITDDYKVPSKKFKVLGNTNRKSIKKNLMGALLFDSGETAEATRLKRTARRRYTRRKNRIRYLQEIFANEMAKLDDSFFQRLEESFLVEEDKKNERHPIFGNLADEVAYHRNYPTIYHLRKKLADSPEKADLRLIYLALAHIIKFRGHFLIEGKLNAENSDVAKLFYQLIQTYNQLFEESPLDEIEVDAKGILSARLSKSKRLEKLIAVFPNEKKNGLFGNIIALALGLTPNFKSNFDLTEDAKLQLSKDTYDDDLDELLGQIGDQYADLFSAAKNLSDAILLSDILRSNSEVTKAPLSASMVKRYDEHHQDLALLKTLVRQQFPEKYAEIFKDDTKNGYAGYVGIGIKHRKRTTKLATQEEFYKFIKPILEKMDGAEELLAKLNRDDLLRKQRTFDNGSIPHQIHLKELHAILRRQEEFYPFLKENREKIEKILTFRIPYYVGPLARGNSRFAWLTRKSEEAITPWNFEEVVDKGASAQSFIERMTNFDEQLPNKKVLPKHSLLYEYFTVYNELTKVKYVTERMRKPEFLSGEQKKAIVDLLFKTNRKVTVKQLKEDYFKKIECFDSVEIIGVEDRFNASLGTYHDLLKIIKDKDFLDNEENEDILEDIVLTLTLFEDREMIEERLKTYAHLFDDKVMKQLKRRHYTGWGRLSRKMINGIRDKQSGKTILDFLKSDGFSNRNFMQLIHDDSLTFKEEIEKAQVSGQGDSLHEQIADLAGSPAIKKGILQTVKIVDELVKVMGHKPENIVIEMARENQTTTKGLQQSRERKKRIEEGIKELESQILKENPVENTQLQNEKLYLYYLQNGRDMYVDQELDINRLSDYDVDHIVPQSFIKDDSIDNKVLTRSVENRGKSDNVPSEEVVKKMKNYWRQLLNAKLITQRKFDNLTKAERGGLSEADKAGFIKRQLVETRQITKHVARILDSRMNTKRDKNDKPIREVKVITLKSKLVSDFRKDFQLYKVRDINNYHHAHDAYLNAVVGTALIKKYPKLESEFVYGDYKVYDVRKMIAKSEQEIGKATAKRFFYSNIMNFFKTEVKLANGEIRKRPLIETNGETGEVVWNKEKDFATVRKVLAMPQVNIVKKTEVQTGGFSKESILSKRESAKLIPRKKGWDTRKYGGFGSPTVAYSILVVAKVEKGKAKKLKSVKVLVGITIMEKGSYEKDPIGFLEAKGYKDIKKELIFKLPKYSLFELENGRRRMLASATELQKANELVLPQHLVRLLYYTQNISATTGSNNLGYIEQHREEFKEIFEKIIDFSEKYILKNKVNSNLKSSFDEQFAVSDSILLSNSFVSLLKYTSFGASGGFTFLDLDVKQGRLRYQTVTEVLDATLIYQSITGLYETRTDLSQLGGD

SEQ ID NO: 99 - protein, 1345 aa, Streptococcus constellatus
MGKPYSIGLDIGTNSVGWAVVTDDYKVPAKKMKVLGNTDKQSIKKNLLGALLFDSGETAEATRLKRTARRRYTRRKNRLRYLQEIFTGEMNKVDENFFQRLDDSFLVDEDKRGEHHPIFGNIAAEVKYHDDFPTIYHLRRHLADTSKKADLRLVYLALAHMIKFRGHFLYEGDLKAENTDVQALFKDFVEEYDKTIEESHLSEITVDALSILTEKVSKSSRLENLIAHYPTEKKNTLFGNLIALSLDLHPNFKTNFQLSEDAKLQFSKDTYEEDLEGFLGEVGDEYADLFASAKNLYDAILLSGILTVDDNSTKAPLSASMVKRYEEHQKDLKKLKDFIKVNAPDQYNAIFKDKNKKGYASYIESGVKQDEFYKYLKGILLKINGSGDFLDKIDREDFLRKQRTFDNGSIPHQIHLQEMHAILRRQGEHYPFLKENQDKIEKILTFRIPYYVGPLARKGSRFAWAEYKADEKITPWNFDDILDKEKSAEKFITRMTLNDLYLPEEKVLPKHSPLYEAFTVYNELTKVKYVNEQGEAKFFDTNMKQEIFDHVFKENRKVTKDKLLNYLNKEFEEFRIVNLTGLDKENKAFNSSLGTYHDLRKILDKSFLDDKANEKTIEDIIQTLTLFEDREMIRQRLQKYSDIFTKAQLKKLERRHYTGWGRLSYKLINGIRNKENKKTILDYLIDDGYANRNFMQLINDDALSFKEEIARAQIIDDVDDIANVVHDLPGSPAIKKGILQSVKIVDELVKVMGHNPANIIIEMARENQTTDKGRRNSQQRLKLLQDSLKNLDNPVNIKNVENQQLQNDRLFLYYIQNGKDMYTGETLDINNLSQYDIDHIIPQAFIKDNSLDNRVLTRSDKNRGKSDDVPSIEVVHEMKSFWSKLLSVKLITQRKFDNLTKAERGGLTEEDKAGFIKRQLVETRQITKHVAQILDERFNTEFDGNKRRIRNVKIITLKSNLVSNFRKEFELYKVREINDYHHAHDAYLNAVVGNALLLKYPQLEPEFVYGEYPKYNSYRSRKSATEKFLFYSNILRFFKKEDIQTNEDGEIAWNKEKHIKILRKVLSYPQVNIVKKTEEQTGGFSKESILPKGESDKLIPRKTKNSYWDPKKYGGFDSPVVAYSILVFADVEKGKSKKLRKVQDMVGITIMEKKRFEKNPVDFLEQRGYRNVRLEKIIKLPKYSLFELENKRRRLLASAKELQKGNELVIPQRFTTLLYHSYRIEKDYEPEHREYVEKHKDEFKELLEYISVFSRKYVLADNNLTKIEMLFSKNKDAEVSSLAKSFISLLTFTAFGAPAAFNFFGENIDRKRYTSVTECLNATLIHQSITGLYETRIDLSKLGED

SEQ ID NO: 100 - protein, 1365 aa, Streptococcus constellatus
MTQKYSIGLDIGTNSVGWAIVTDDYKVPAKKMKILGNTNKQYIKKNLLGALLFDSGETAKATRLKRTARRRYTRRKNRLRYLQEIFIEEMNKVDENFFQRLDDSFLVTEDKRGSKYPIFGTLKEEKEYYKEFETIYHLRKRLADSTGKVDLRLVYLALAHMIKFRGHFLIEGQLKAENTDVQTLFNDFVEVYDKTIEESHLAEITVDALSILTEKVSKSRRLENLVKCYPTEKKNTLFGNLIALSLGLQPNFKTNFQLSEDAKLQFSKDTYEEDLEELLGKIGDDYADLFTSAKNLYDTILLSGILAVDDNSTKALLSASMIKRYEEHQKDLKKLKDFIKVNAPAQYDDIFKDETKNGYAGYIENGVKQDEFYKYLKNTLSKIDGSGYFLDKIEREDFLRKQRTFDNGSIPHQIHLQEMHAILRRQGEHYPFLKENQDKIEKILTFRIPYYVGPLVRKGSRFAWAEYKADEKITPWNFDDILDKEKSAEKFITRMTLNDLYLPEEKVLPKHSLLYEIFTVYNELTKVKYVNEQGEAKFFDANMKQEIFDHVFKENPKVTKDKLLNYLDKEFDEFRIVDLTGLDKENKAFNASLGTYHDLRKILDKSFLDDKANEKTIEDIIQTLTLFEDREMIRQRLQKYSDIFTKAQLKKLERRHYTGWGRLSYKLINGIRNKENNKTILEYLVDDGYANRNFMQLINDDTLPFKQIIKDAQAIDDVDDIELIVHDLPGSPAIKKGILQSIKIVDELVKVMGYNPDNIVIEMARENQTTTKGRRNSQQRLKLLQDSLTNLDNPVSIKNVENQQLQNDRLFLYYIQNGKDMYTGEELDIHHLSDYDIDHIIPQAFIKDDSIDNRVLTSSAKNRGKSDNVPNLEVVCDRKADWIRLREAGLISQRKFDNLTKAERGGLTENDKAGFIHRQLVETRQITKHVAQILDARFNPKRDDNKKVIRDVKIITLKSNLVSQFRRDFKLYKVREINDYHHAHDAYLNAVVGTALLKKYPKLTSEFVYGEYKKYDVRKFIAKSDNDEIGKATAKYFFYSNLMNFFKTEVKFADGTVVERPDIETSEDGEIAWNKQTDFKIVRKVLSYPQVNIVKKVEKQTGRFSKESILPKGDSDKLIARKTKENYWDTKKYGGFDSPTVAYSVLVVADIKKGKAKKLKTVKELVGISIMERPFFEKNPIMFLESKGYRNIQKDKLIKLPKYSLFEFEGGRRRLLASAVELQKGNEMVLPQYLNNLLYHAHRIDNSDNSEHLKYITEHKEEFGKLLSYIENFAKSYVDVDKNLEKIQLAVEKIDSFSVKEISNSFIHLLTLTALGAPADFNFLGEKIPRKRYTSTKECLNATLIHQSITGLYETQTDLSKLGED

SEQ ID NO: 101 - protein, 1371 aa, Streptococcus dysgalactiae
MDKKYSIGLDIGTNSVGWAVITDDYKVPSKKFKVLGNTDRHSIKKNLIGALLFDSGETAEATRLKRTARRRYTRRKNRIRYLQEIFSSEMSKVDDSFFHRLEESFLVEEDKKHERHPIFGNIVDEVAYHEKYPTIYHLRKKLADSTDKADLRLIYLALAHMIKFRGHFLIEGDLNPDNSDMDKLFIQLVQTYNQLFEENPINASRVDAKAILSARLSKSRRLENLIAQLPGEKRNGLFGNLIALSLGLTPNFKSNFDLAEDAKLQLSKDTYDDDLDNLLAQIGDQYADLFLAAKNLSDAILLSDILRVNSEITKAPLSASMIKRYDEHHQDLTLLKALVRQQLPEKYKEIFFDQSKNGYAGYIDGGASQEEFYKFIKPILEKMDGTEELLAKLNREDLLRKQRTFDNGSIPHQIHLGELHAILRRQEDFYPFLKDNREKIEKILTFRIPYYVGPLARGNSRFAWMTRKSEETITPWNFEEVVDKGASAQSFIERMTNFDKNLPNEKVLPKHSLLYEYFTVYNELTKVKYVTEGMRKPEFLSGKQKEAIVDLLFKTNRKVTVKQLKEDYFKKIECFDSVEISGVEDRFNASLGTYHDLLKIIKDKDFLDNEENEDILEDIVLTLTLFEDKEMIEERLKKYANLFDDKVMKQLKRRHYTGWGRLSRKLINGIRDKQSGKTILDFLKSDGFANRNFMQLINDDSLTFKEAIQKAQVSGQGHSLHEQIANLAGSPAIKKGILQSVKVVDELVKVMGHKPENIVIEMARENQTTQKGQKNSRERMKRIEEGIKELGSQILKEHPVENTQLQNEKLYLYYLQNGRDMYVDQELDINRLSDYDVDHIVPQSFIKDDSIDNKILTRSDKNRGKSDNVPSEEVVKKMKNYWRQLLNAKLITQRKFDNLTKAERGGLSELDKAGFIKRQLVETRQITKHVAQILDSRMNTKYDENDKLIREVKVITLKSKLVSDFRKDFQFYKVREINNYHHAHDAYLNAVVGTALIKKYTKLESEFVYGDYKVYDVRKMIAKSEQEIGKATAKRFFYSNIMNFFKTEITLANGEIRKRPLIETNEETGEIVWDKGRDFATVRKVLSMPQVNIVKKTEVQTGALTNESIYARGSFDKLISRKHRFESSKYGGFGSPTVTYSVLVVAKSKVQDGKVKKIKTGKELIGMTLLDKLVFEKNPLKFIEDKGYGNVQIDKCIKLPKYSLFEFENGTRRMLASVMANNNSRGDLQKANEMFLPAKLVTLLYHAHKIESSKELEHEAYILDHYNDLYQLLSYIERFASLYVDVEKNISKVKELFSNIESYSISEICSSVINLLTLTASGAPADFKFLGTTIPRKRYGSPQSILSSTLIHQSITGLYETRIDLSQLGGD

SEQ ID NO: 102 - protein, 1371 aa, Streptococcus dysgalactiae
MDKKYSIGLDIGTNSVGWAVITDDYKVPSKKFKVLGNTDRHSIKKNLIGALLFDSGETAEATRLKRTARRRYTRRKNRIRYLQEIFSSEMSKVDDSFFHRLEESFLVEEDKKHERHPIFGNIVDEVAYHEKYPTIYHLRKKLADSTDKADLRLIYLALAHMIKFRGHFLIEGDLNPDNSDVDKLFIQLVQTYNQLFEEKPINASGVDAKAILSARLSKSKRLENLIAQLPGEKKNGLFGNLIALSLGLTPNFKSNFDLAEDAKLQLSKDTYDDDLDNLLAQIGNQYADLFLAAKNLSDAILLSDILRVNSEITKAPLSASMIKRYDEHHQDLTLLKALVRQQLPEKYKEIFFDQSKNGYAGYIDGGASQEEFYKFIKPILEKMDGTEELLAKLNREDLLRKQRTFDNGSIPHQIHLGELHAILRRQEDFYPFLKDNREKIEKILTFRIPYYVGPLARGNSRFAWMTRKSEETITPWNFEEVVDKGASAQSFIERMTNFDKNLPNEKVLPKHSLLYEYFTVYNELTKVKYVTEGMRKPEFLSGKQKEAIVDLLFKTNRKVTVKQLKEDYFKKIECFDSVEISGVEDRFNASLGTYHDLLKIIKDKDFLDNEENEDILEDIVLTLTLFEDKEMIEERLKKYANLFDDKVMKQLKRRHYTGWGRLSRKLINGIRDKQSGKTILDFLKSDGFANRNFMQLINDDSLTFKEAIQKAQVSGQGHSLHEQIANLAGSPAIKKGILQSVKVVDELVKVMGHKPENIVIEMARENQTTQKGQKNSRERMKRIEEGIKELGSQILKEHPVENTQLQNEKLYLYYLQNGRDMYVDQELDINRLSDYDVDHIVPQSFIKDDSIDNKVLTRSDKNRGKSDNVPSEEVVKKMKNYWRQLLNAKLITQRKFDNLTKAERGGLSELDKAGFIKRQLVETRQITKHVAQILDSRMNTKYDENDKLIREVKVITLKSKLVSDFRKDFQFYKVREINNYHHAHDAYLNAVVGTALIKKYPKLESEFVYGDYKVYDVRKMIAKSEQEIGKATAKRFFYSNIMNFFKTEITLANGEIRKRPLIETNEETGEIVWDKGRDFATVRKVLSMPQVNIVKKTEVQTGALTNESIYARGSFDKLISRKHRFESSKYGGFGSPTVTYSVLVVAKSKVQDGKVKKIKTGKELIGITLLDKLVFEKNPLKFIEDKGYGNVQIDKCIKLPKYSLFEFENGTRRMLASVMANNNSRGDLQKANEMFLPAKLVTLLYHAHKIESSKELEHEAYILDHYNDLYQLLSYIERFASLYVDVEKNISKVKELFSNIESYSISEICSSVINLLTLTASGAPADFKFLGTTIPRKRYGSPQSILSSTLIHQSITGLYETRIDLSQLGGD

SEQ ID NO: 103 - protein, 1371 aa, Streptococcus dysgalactiae
MDKKYSIGLDIGTNSVGWAVITDDYKVPSKKFKVLGNTDRHSIKKNLIGALLFDSGETAEATRLKRTARRRYTRRKNRIRYLQEIFSSEMSKVDDSFFHRLEESFLVEEDKKHERHPIFGNIVDEVAYHEKYPTIYHLRKKLADSTDKADLRLIYLALAHMIKFRGHFLIEGDLNPDNSDMDKLFIQLVQTYNQLFEENPINASRVDAKAILSARLSKSRRLENLIAQLPGEKRNGLFGNLIALSLGLTPNFKSNFDLAEDAKLQLSKDTYDDDLDNLLAQIGDQYADLFLAAKNLSDAILLSDILRVNSEITKAPLSASMIKRYDEHHQDLTLLKALVRQQLPEKYKEIFFDQSKNGYAGYIDGGASQEEFYKFIKPILEKMDGTEELLAKLNREDLLRKQRTFDNGSIPHQIHLGELHAILRRQEDFYPFLKDNREKIEKILTFRIPYYVGPLARGNSRFAWMTRKSEETITPWNFEEVVDKGASAQSFIERMTNFDKNLPNEKVLPKHSLLYEYFTVYNELTKVKYVTEGMRKPEFLSGKQKEAIVDLLFKTNRKVTVKQLKEDYFKKIECFDSVEISGVEDRFNASLGTYHDLLKIIKDKDFLDNEENEDILEDIVLTLTLFEDKEMIEERLKTYAHLFDDKVMKQLKRRHYTGWGRLSRKLINGIRDKQSGKTILDFLKSDGFANRNFIQLIHDDSLTFKEAIQKAQVSGQGHSLHEQIANLAGSPAIKKGILQSVKVVDELVKVMGHKPENIVIEMARENQTTQKGQKNSRERMKRIEEGIKELGSQILKEHPVENTQLQNEKLYLYYLQNGRDMYVDQELDINRLSDYDVDHIVPQSFIKDDSIDNKVLTRSDKNRGKSDDVPSEEVVKKMKNYWRQLLNAKLITQRKFDNLTKAERGGLSELDKAGFIKRQLVETRQITKHVAQILDSRMNTKYDENDKLIREVKVITLKSKLVSDFRKDFQFYKVREINNYHHAHDAYLNAVVGTALIKKYPKLESEFVYGDYKVYDVRKMIAKSEQEIGKATAKRFFYSNIMNFFKTEITLANGEIRKRPLIETNEETGEIVWNKGRDFATVRKVLSMPQVNIVKKTEVQTGALTNESIYARGSFDKLISRKHRFESSKYGGFGSPTVTYSVLVVAKSKVQDGKVKKIKTGKELIGITLLDKLVFEKNPLKFIEDKGYGNVQIDKCIKLPKYSLFEFENGTRRMLASVMANNNSRGDLQKANEMFLPAKLVTLLYHAHKIESSKELEHEAYILDHYNDLYQLLSYIERFASLYVDVEKNISKVKELFSNIESYSISEICSSVINLLTLTASGAPADFKFLGTTIPRKRYGSPQSILSSTLIHQSITGLYETRIDLSQLGGD

SEQ ID NO: 104 - protein, 1371 aa, Streptococcus dysgalactiae
MDKKYSIGLDIGTNSVGWAVITDDYKVPSKKFKVLGNTDRHSIKKNLIGALLFDSGETAEATRLKRTARRRYTRRKNRIRYLQEIFSSEMSKVDDSFFHRLEESFLVEEDKKHERHPIFGNIVDEVAYHEKYPTIYHLRKKLADSTDKADLRLIYLALAHMIKFRGHFLIEGDLNPDNSDMDKLFIQLVQTYNQLFEENPINASRVDAKAILSARLSKSRRLENLIAQLPGEKRNGLFGNLIALSLGLTPNFKSNFDLAEDAKLQLSKDTYDDDLDNLLAQIGDQYADLFLAAKNLSDAILLSDILRVNSEITKAPLSASMIKRYDEHHQDLTLLKALVRQQLPEKYKEIFFDQSKNGYAGYIDGGASQEEFYKFIKPILEKMDGTEELLAKLNREDLLRKQRTFDNGSIPHQIHLGELHAILRRQEDFYPFLKDNREKIEKILTFRIPYYVGPLARGNSRFAWMTRKSEETITPWNFEEVVDKGASAQSFIERMTNFDKNLPNEKVLPKHSLLYEYFTVYNELTKVKYVTEGMRKPEFLSGKQKEAIVDLLFKTNRKVTVKQLKEDYFKKIECFDSVEISGVEDRFNASLGTYHDLLKIIKDKDFLDNEENEDILEDIVLTLTLFEDKEMIEERLKKYANLFDDKVMKQLKRRHYTGWGRLSRKLINGIRDKQSGKTILDFLKSDGFANRNFMQLINDDSLTFKEAIQKAQVSGQGHSLHEQIANLAGSPAIKKGILQSVKVVDELVKVMGHKPENIVIEMARENQTTQKGQKNSRERMKRIEEGIKELGSQILKEHPVENTQLQNEKLYLYYLQNGRDMYVDQELDINRLSDYDVDHIVPQSFIKDDSIDNKVLTRSDKNRGKSDNVPSEEVVKKMKNYWRQLLNAKLITQRKFDNLTKAERGGLSELDKAGFIKRQLVETRQITKHVAQILDSRMNTKYDENDKLIREVKVITLKSKLVSDFRKDFQFYKVREINNYHHAHDAYLNAVVGTALIKKYPKLESEFVYGDYKVYDVRKMIAKSEQEIGKATAKRFFYSNIMNFFKTEITLANGEIRKRPLIETNEETGEIVWDKGRDFATVRKVLSMPQVNIVKKTEVQTGALTNESIYARGSFDKLISRKHRFESSKYGGFGSPTVTYSVLVVAKSKVQDGKVKKIKTGKELIGITLLDKLVFEKNPLKFIEDKGYGNVQIDKCIKLPKYSLFEFENGTRRMLASVMANNNSRGDLQKANEMFLPAKLVTLLYHAHKIESSKELEHEAYILDHYNDLYQLLSYIERFASLYVDVEKNISKVKELFSNIESYSISEICSSVINLLTLTASGAPADFKFLGTTIPRKRYGSPQSILSSTLIHQSITGLYETRIDLSQLGGD

SEQ ID NO: 105 - protein, 1371 aa, Streptococcus dysgalactiae
MDKKYSIGLDIGTNSVGWAVITDDYKVPSKKFKVLGNTDRHSIKKNLIGALLFDSGETAEATRLKRTARRRYTRRKNRIRYLQEIFSSEMSKVDDSFFHRLEESFLVEEDKKHERHPIFGNIVDEVAYHEKYPTIYHLRKKLADSTDKADLRLIYLALAHMIKFRGHFLIEGDLNPDNSDMDKLFIQLVQTYNQLFEENPINASRVDAKAILSARLSKSRRLENLIAQLPGEKRNGLFGNLIALSLGLTPNFKSNFDLAEDAKLQLSKDTYDDDLDNLLAQIGDQYADLFLAAKNLSDAILLSDILRVNSEITKAPLSASMIKRYDEHHQDLTLLKALVRQQLPEKYKEIFFDQSKNGYAGYIDGGASQEEFYKFIKPILEKMDGTEELLAKLNREDLLRKQRTFDNGSIPHQIHLGELHAILRRQEDFYPFLKDNREKIEKILTFRIPYYVGPLARGNSRFAWMTRKSEETITPWNFEEVVDKGASAQSFIERMTNFDKNLPNEKVLPKHSLLYEYFTVYNELTKVKYVTEGMRKPEFLSGKQKEAIVDLLFKTNRKVTVKQLKEDYFKKIECFDSVEISGVEDRFNASLGTYHDLLKIIKDKDFLDNEENEDILEDIVLTLTLFEDKEMIEERLKTYAHLFDDKVMKQLKRRHYTGWGRLSRKLINGIRDKQSGKTILDFLKSDGFANRNFIQLIHDDSLTFKEAIQKAQVSGQGHSLHEQIANLAGSPAIKKGILQSVKVVDELVKVMGHKPENIVIEMARENQTTQKGQKNSRERMKRIEEGIKELGSQILKEHPVENTQLQNEKLYLYYLQNGRDMYVDQELDINRLSDYDVDHIVPQSFIKDDSIDNKVLTRSDKNRGKSDDVPSEEVVKKMKNYWRQLLNAKLITQRKFDNLTKAERGGLSELDKAGFIKRQLVETRQITKHVAQILDSRMNTKYDENDKLIREVKVITLKSKLVSDFRKDFQFYKVREINNYHHAHDAYLNAVVGTALIKKYPKLESEFVYGDYKVYDVRKMIAKSEQEIGKATAKRFFYSNIMNFFKTEITLANGEIRKRPLIETNEETGEIVWDKGRDFATVRKVLSMPQVNIVKKTEVQTGALTNESIYARGSFDKLISRKHRFESSKYGGFGSPTVTYSVLVVAKCKVQDGKVKKIKTGKELIGITLLDKLVFEKNPLKFIEDKGYGNVQIDKCIKLPKYSLFEFENGTRRMLASVMANNNSRGDLQKANEMFLPAKLVTLLYHAHKIESSKELEHEAYILDHYNDLYQLLSYIERFASLYVDVEKNISKVKELFSNIESYSISEICSSVINLLTLTASGAPADFKFLGTTIPRKRYGSPQSILSSTLIHQSITGLYETRIDLSQLGGD

SEQ ID NO: 106 - protein, 1371 aa, Streptococcus dysgalactiae
MDKKYSIGLDIGTNSVGWAVITDDYKVPSKKFKVLGNTDRHSIKKNLIGALLFDSGETAEATRLKRTARRRYTRRKNRIRYLQEIFSSEMSKVDDSFFHRLEESFLVEEDKKHERHPIFGNIVDEVAYHEKYPTIYHLRKKLADSTDKADLRLIYLALAHMIKFRGHFLIEGDLNPDNSDVDKLFIQLVQTYNQLFEENPINASRVDAKAILSARLSKSRRLENLIAQLPGEKRNGLFGNLIALSLGLTPNFKSNFDLAEDAKLQLSKDTYDDDLDNLLAQIGDQYADLFLAAKNLSDAILLSDILRVNSEITKAPLSASMIKRYDEHHQDLTLLKALVRQQLPEKYKEIFFDQSKNGYAGYIDGGASQEEFYKFIKPILEKMDGTEELLAKLNREDLLRKQRTFDNGSIPHQIHLGELHAILRRQEDFYPFLKDNREKIEKILTFRIPYYVGPLARGNSRFAWMTRKSEETITPWNFEEVVDKGASAQSFIERMTNFDKNLPNEKVLPKHSLLYEYFTVYNELTKVKYVTEGMRKPAFLSGEQKKAIVDLLFKTNRKVTVKQLKEDYFKKIECFDSVEISGVEDRFNASLGTYHDLLKIIKDKDFLDNEENEDILEDIVLTLTLFEDKEMIEERLKTYAHLFDDKVMKQLKRRHYTGWGRLSRKLINGIRDKQSGKTILDFLKSDGFANRNFIQLIHDDSLTFKEAIQKAQVSGQGHSLHEQIANLAGSPAIKKGILQSVKVVDELVKVMGHKPENIVIEMARENQTTQKGQKNSRERMKRIEEGIKELGSQILKEHPVENTQLQNEKLYLYYLQNGRDMYVDQELDINRLSDYDVDHIVPQSFIKDDSIDNKVLTRSDKNRGKSDNVPSEEVVKKMKNYWRQLLNAKLITQRKFDNLTKAERGGLSELDKAGFIKRQLVETRQITKHVAQILDSRMNTKYDENDKLIREVKVITLKSKLVSDFRKDFQFYKVREINNYHHAHDAYLNAVVGTALIKKYPKLESEFVYGDYKVYDVRKMIAKSEQEIGKATAKRFFYSNIMNFFKTEITLANGEIRKRPLIETNEETGEIVWDKGRDFATVRKVLSMPQVNIVKKTEVQTGALTNESIYARGSFDKLISRKHRFESSKYGGFGSPTVTYSVLVVAKSKVQDGKVKKIKTGKELIGITLLDKLVFEKNPLKFIEDKGYGNVQIDKCIKLPKYSLFEFENGTRRMLASVMANNNSRGDLQKANEMFLPAKLVTLLYHAHKIESSKELEHEAYILDHYNDLYQLLSYIERFASLYVDVEKNISKVKELFSNIESYSISEICSSVINLLTLTASGAPADFKFLGTTIPRKRYGSPQSILSSTLIHQSITGLYETRIDLSQLGGD

SEQ ID NO: 107 - protein, 1348 aa, Streptococcus equi
MKKPYTIALDIGTNSVGWVVVTDDYRVPTKKMKVLGNTERKTIKKNLIGALLFDSGDTAEGTRLKRTARRRYTRRKNRLRYLKEIFTEEMAKVDDGFFQRLEDSFYVLEDKEGNKHPIFANLADEVAYHKKYPTIYHLRKELVDNPQKADLRLIYLAVAHIIKFRGHFLIEGTLSSKNNNLQKSFDHLVDTYNLLFEEQRLLTEGINAKELLSAALSKSKRLENLISLIPGQKKTGIFGNIIALSLGLTPNFKANFGLSKDVKLQLAKDTYADDLDSLLAQIGDQYADLFLAAKNLSDAILLSDILTESDEITRAPLSASMVKRYREHHKDLVTLKTLIKDQLPEKYQEIFLDKTKNGYAGYIEGQVSQEEFYKYLKPILARLDGSEPLLLKIDREDFLRKQRTFDNGSIPHQIHLEELHAILRRQEVFYPFLKDNRKKIESLLTFRIPYYVGPLARGHSRFAWVKRKFDGAIRPWNFEEIVDEEASAQIFIEKMTKNDLYLPNEKVLPKHSLLYETFTVYNELTKVKYATEGMTRPQFLSADQKQAIVDLLFKTNRKVTVKQLKENYFKKIECWDSVEITGVEDSFNASLGTYHDLLKIIQDKDFLDNPDNQKIIEDIILTLTLFEDKKMISKRLDQYAHLFDKVVLNKLERHHYTGWGRLSGKLINGIRDKQSGKTILDFLKADGFANRNFMQLIHDSELSFIDEIAKAQVIGKTEYSKDLVGNLAGSPAIKKGISQTIKIVDELVKIMGYLPQQIVIEMARENQTTAQGIKNARQRMRKLEETAKKLGSNILKEHPVDNSQLQNDKRYLYYLQNGKDMYTGDDLDIDYLSSYDIDHIIPQSFIKNNSIDNKVLTSQGANRGKLDNVPSEAIVRKMKGYWQSLLRAGAISKQKFDNLTKAERGGLTQVDKAGFIQRQLVETRQITKHVAQILDSRFNTEFDDHNKRIRKVHIITLKSKLVSDFRKEFGLYKIRDINHYHHAHDAYLNAVVAKAILGKYPQLAPEFVYGDYPKYNSFKERQKATQKMLFYSNILKFFKDQESLHVNSDGEEIWNANKHLPIIKNVLSIPQVNIVKKTEVQTGGFYKESILSKGNSDKLIPRKNNWDTRKYGGFDSPTVAYSVLVIAKMEKGKAKVLKPVKEMVGITIMERTAFEENPVVFLEARGYREIQEHLIIKLPKYSLFELENGRRRLLASASELQKGNELFLPVDYMTFLYLAAHYHELTGSSEDVLRKKYFVDRHLHYFDDIIQMINDFAERHILASSNLEKINHTYHNNSDLPVNERAENIINVFTFVALGAPAAFKFFDATIDRKRYTSTKEVLNATLIHQSVTGLYETRIDLSQLGEN

SEQ ID NO: 108 - protein, 1348 aa, Streptococcus equi
MKKPYTIALDIGTNSVGWVVVTDDYRVPTKKMKVLGNTERKTIKKNLIGALLFDSGDTAEGTRLKRTARRRYTRRKNRLRYLKEIFTEEMAKVDDGFFQRLEDSFYVLEDKEGNKHPIFANLADEVAYHKKYPTIYHLRKELVDNPQKADLRLIYLAVAHIIKFRGHFLIEGTLSSKNNNLQKSFDHLVDTYNLLFEEQRLLTEGINAKELLSAALSKSKRLENLISLIPGQKKTGIFGNIIALSLGLTPNFKANFGLSKDVKLQLAKDTYADDLDSLLAQIGDQYADLFLAAKNLSDAILLSDILTESDEITRAPLSASMVKRYREHHKDLVTLKTLIKDQLPEKYQEIFLDKTKNGYAGYIEGQVSQEEFYKYLKPILARLDGSEPLLLKIDREDFLRKQRTFDNGSIPHQIHLEELHAILRRQEVFYPFLKDNRKKIESLLTFRIPYYVGPLARGHSRFAWVKRKFDGAIRPWNFEEIVDEEASAQIFIEKMTKNDLYLPNEKVLPKHSLLYETFTVYNELTKVKYATEGMTRPQFLSADQKQAIVDLLFKTNRKVTVKQLKENYFKKIECWDSVEITGVEDSFNASLGTYHDLLKIIQDKDFLDNPDNQKIIEDIILTLTLFEDKKMISKRLDQYAHLFDKVVLNKLERHHYTGWGRLSGKLINGIRDKQSGKTILDFLKADGFANRNFMQLIHDSELSFIDEIAKAQVIGKTEYSKDLVGNLASSPAIKKGISQTIKIVDELVKIMGYLPQQIVIEMARENQTTAQGIKNARQRMRKLEETAKKLGSNILKEHPVDNSQLQNDKRYLYYLQNGKDMYTGDDLDIDYLSSYDIDHIIPQSFIKNNSIDNKVLTSQGANRGKLDNVPSEAIVRKMKGYWQSLLRAGAISKQKFDNLTKAERGGLTQVDKAGFIQRQLVETRQITKHVAQILDSRFNTEFDDHNKRIRKVHIITLKSKLVSDFRKEFGLYKIRDINHYHHAHDAYLNAVVAKAILGKYPQLAPEFVYGDYPKYNSFKERQKATQKTLFYSNILKFFKDQESLHVNSDGEEIWNANKHLPIIKNVLSIPQVNIVKKTEVQTGGFYKESILSKGNSDKLIPRKNNWDTRKYGGFDSPTVAYSVLVIAKMEKGKAKVLKPVKEMVGITIMERIAFEENPVVFLEAKGYREIQEHLIIKLPKYSLFELENGRRRLLASASELQKGNELFLPVDYMTFLYLAAHYHELTGSSEDVLRKKYFVERHLHYFDDIIQMINDFAERHILASSNLEKINHTYHNNSDLPINERAENIINVFTFVALGAPAAFKFFDATIDRKRYTSTKEVLNATLIHQSVTGLYETRIDLSQLGEN

SEQ ID NO: 109 - protein, 1348 aa, Streptococcus equi
MKKPYTIALDIGTNSVGWVVVTDDYRVPTKKMKVLGNTERKTIKKNLIGALLFDSGDTAEGTRLKRTARPRYTRRKNRLRFLKEIFTEEMAKVDDGFFQRLEDSFYVLEDKEGNKHPIFANLADEVAYHKKYPTIYHLRKELVDNPQKADLRLIYLAVAHIIKFRGHFLIEGTLSSKNNNLQKSFDHLVDTYNLLFEEQRLLTEGINAKELLSAALSKSKRLENLISLIPGQKKTGIFGNIIALSLGLTPNFKANFGLSKDVKLQLAKDTYADDLDSLLAQIGDQYADLFLAAKNLSDAILLSDILTESDEITRAPLSASMVKRYREHHKDLVTLKTLIKDQLPEKYQEIFLDKTKNGYAGYIEGQVSQEEFYKYLKPILARLDGSEPLLLKIDREDFLRKQRTFDNGSIPHQIHLEELHAILRRQEVFYPFLKDNRKKIESLLTFRIPYYVGPLARGHSRFAWVKRKFDGAIRPWNFEEIVDEEASAQIFIEKMTKNDLYLPNEKVLPKHSLLYETFTVYNELTKVKYATEGMTRPQFLSADQKQAIVDLLFKTNRKVTVKQLKENYFKKIECWDSVEITGVEDSFNASLGTYHDLLKIIQDKDFLDNPDNQKIIEDIILTLTLFEDKKMISKRLDQYAHLFDKVVLNKLERHHYTGWGRLSGKLINGIRDKQSGKTILDFLKADGFANRNFMQLIHDSELSFIDEIAKAQVIGKTEYSKDLVGNLAGSPAIKKGISQTIKIVDELVKIMGYLPQQIVIEMARENQTTAQGIKNARQRMRKLEETAKKLGSNILKEHPVDNSQLQNDKRYLYYLQNGKDMYTGDDLDIDYLSSYDIDHIIPQSFIKNNSIDNKVLTSQGANRGKLDNVPSEAIVRKMKGYWQSLLRAGAISKQKFDNLTKAERGGLTQVDKAGFIQLQLVETRQITKHVAQILDSRFNTEFDDHNKRIRKVHIITLKSKLVSDFRKEFGLYKIRDINHYHHAHDAYLNAVVAKAILGKYPQLAPEFVYGDYPKYNSFKERQKATQKTLFYSNILKFFKDQESLHVNSDGEEIWNANKHLPIIKNVLSIPQVNIVKKTEVQTGGFYKESILSKGNSDKLIPRKNNWDTRKYGGFDSPTVAYSVLVIAKMEKGKAKVLKPVKEMVGITIMERIAFEENPVVFLEAKGYREIQEHLIIKLPKYSLFELENGRRRLLASASELQKGNELFLPVDYMTFLYLAAHYHELTGSSEDVLRKKYFVERHLHYFDDIIQMINDFAERHILASSNLEKINHTYHNNSDLPVNERAENIINVFTFVALGAPAAFKFFDATIDRKRYTSTKEVLNATLIHQSVTGLYETRIDLSQLGEN

SEQ ID NO: 110 - protein, 1377 aa, Streptococcus equinus
MEKTYSIGLDIGTNSVGWAVITDDYKVPAKKMKVLGNTDKKYIKKNLLGALLFDSGETAEATRLKRAARRRYTRRKNRLRYLQEIFAKEMAKVDESFFQRLEESFLTDDDKTFDSHPIFGNKAEEDTYHQEFPTIYHLRKHLADSPEKVDLRLVYLALAHMIKFRGHFLIEGQLNAENTDVQKIFADFVGVYDRTFDDSHLSEITVDAASILTEKISKSRRLENLIKQYPTEKKNTLFGNLVALALGLQPNFKTNFKLSEDAKLQFSKDTYDEDLEELLGKIGDDYADLFTAAKNLYDAILLSGILTVDDNSTKAPLSASMIKRYEEHHEDLEKLKTFIKVNNFDKYHEIFKDKSKNGYAGYIENGVKQDIFYKHLKSIISEKNGGQYFLDKIEREDFLRKQRTFDNGSIPYQIHLQEMRTILRRQGEYYPFLKENQAKIEKILTFRIPYYVGPLARKNSRFAWAKYHSDEPITPWNFDEVVDKEKSAEKFITRMTLNDLYLPEEKVLPKHSYVYETFAVYNELTKIKYVNEQGKSFFFDANMKQEIFDHVFKENRKVTKAKLLSYLNNEFEEFRINDLIGLDKDSKSFNASLGTYHDLKKILDKSFLDDKTNEQIIEDIVLTLTLFEDRDMIHERLQKYSDIFTSQQLKKLERRHYTGWGRLSYKLINGIRNKENNKTILDFLIDDGDANRNFMQLINDDSLSFKTTIQEAQVVGDVDDIEAVVHDLPGSPAIKKGILQSVKIVDELVKVMGHNPQNIVIEMARENQITGYGRNRSNQRLKRLQDSLKEFGSDILSKKKPSYVDSKVENSHLQNDRLFLYYIQNGKDMYTGEELDIDHLSDYDIDHIIPQAFIKDNSIDNRVLTSSAKNRGKSDDVPSIEIVRNRKSYWYKLYKSGLISKRKFDNLTKAERGGLTETDKAGFIKRQLVETRQITKHVAQILDARFNTKCDENDKVIRDVKVITLKSSLVSQFRKEFKFYKVREINDYHHAHDAYLNAVVGTALLKKYPKLAPEFVYGEYKKYDVRKLVAKSSDNHSELGKATAKYFFYSNLMNFFKTEVKYADGRVFERPDIETNADGEVVWNKQRDFNIVRKVLSYPQVNIVKKVEVQTGGFSKESILPKGDSDKLIPRKTKKLQWETQKYGGFDSPTVAYSVLVVADVEKGKTRKLKTVKELVGISIMERSSFEENPVSFLEKKGYHNVQEDKLIKLPKYSLFEFEGGRRRLLASATELQKGNEVVLPQYMVNLLYHSQHVNNSHKPEHLNYVKQHKDEFKDIFNLIISIARINILKPKVVDNLINEFTEYGQEDISSLSESFINLLKFISFGAPGAFKFLKLDVKQSNLRYKSTTEALSATLIHQSVTGLYETRIDLSKLGEE

SEQ ID NO: 111 - protein, 1370 aa, Streptococcus gallolyticus
MTKKNYSIGLDIGTNSVGWAVITDDYKVPAKKMKVLGNTDKKYIKKNLLGALLFDSGETAEATRLKRTARRRYTRRKNRLRYLQEIFAEEMTKVDESFFYRLDESFLTTDEKDFERHPIFGNKAEEDAYHQKFPTIYHLRNYLADSSEKADLRLVYLALAHMIKYRGHFLIEGKLNAENTDVQKLFTDFVGVYDRTFDDSHLSEITVDVASTLTEKISKSRRLENLIKYYPTEKKNTLFGNLIALALGLQPNFKMNFKLSEDAKLQFSKDTYEEDLEELLGKIGDDYADLFTSAKNLYDAILLSGILTVDDNSTKAPLSASMIKRYVEHHEDLEKLKEFIKANKSELYHDIFKDKNKNGYAGYIENGVKQDEFYKYLKNTLSKIDGSDYFLDKIEREDFLRKQRTFDNGSIPHQIHLQEMHAILRRQGDYYPFLKEKQDRIEKILTFRIPYYVGPLVRKDSRFAWAEYRSDEKITPWNFDKVIDKEKSAEKFITRMTLNDLYLPEEKVLPKHSHVYETYAVYNELTKIKYVNEQGKESFFDSNMKQEIFDHVFKENRKVTKEKLLNYLNKEFPEYRIKDLIGLDKENKSFNASLGTYHDLKKILDKAFLDDKVNEEVIEDIIKTLTLFEDKDMIHERLQKYSDIFTANQLKKLERRHYTGWGRLSYKLINGIRNKENNKTILDYLIDDGSANRNFMQLINDDTLPFKQIIQKSQVVGDVDDIEAVVHDLPGSPAIKKGILQSVKIVDELVKVMGDNPDNIVIEMARENQTTNRGRSQSQQRLKKLQSSLKELGSNILNEEKPSYIEDKVENSHLQNDQLFLYYIQNGKDMYTGDELDIDHLSDYDIDHIIPQAFIKDDSIDNRVLTSSAKNRGKSDDVPSLDIVRARKAEWVRLYKSGLISKRKFDNLTKAERGGLTEADKAGFIKRQLVETRQITKHVAQILDARFNTEHDENDKVIRDVKVITLKSNLVSQFRKDFEFYKVREINDYHHAHDAYLNAVVGTALLKKYPKLASEFVYGEYKKYDIRKFITNSSDKATAKYFFYSNLMNFFKTKVKYADGTVFERPIIETNADGEIAWNKQIDFEKVRKVLSYPQVNIVKKVETQTGGFSKESILPKGDSDKLIPRKTKKVYWDTKKYGGFDSPTVAYSVFVVADVEKGKAKKLKTVKELVGISIMERSFFEENPVEFLENKGYHNIREDKLIKLPKYSLFEFEGGRRRLLASASELQKGNEMVLPGYLVELLYHAHRADNFNSTEYLNYVSEHKKEFEKVLSCVEDFANLYVDVEKNLSKIRAVADSMDNFSIEEISNSFINLLTLTALGAPADFNFLGEKIPRKRYTSTKECLTATLIHQSITGLYETRIDLSKLGEE

SEQ ID NO: 112 - protein, 1371 aa, Streptococcus gallolyticus
MTEKNYSIGLDIGTNSVGWAVITDDYKVPAKKMKVLGNTDKKYIKKNLLGALLFDNGETAEATRLKRTARRRYTRRKNRLRYLQEIFAEEMAKVDESFFYRLDESFLTTDDKDFERHPIFGNKADEIKYHQEFPTIYHLRKHLADSHEKADLRLIYLALAHMIKFRGHFLIEGELNAENTDVQKLFEAFVEVYDRTFDDSNLSEITVDASSILTEKFSKSRRLENLIKHYPTEKKNTLFGNLVALALGLQPNFKTSFKLSEDAKLQFSKDTYEEDLEELIGKIGDEYADLFTSAKNLYDAILLSGILTVADNTTKAPLSASMIKRYNEHQVDLKKLKEFIKNNASDKYDEIFNDKDKNGYAGYIENGVKQDEFYKYLKTTLSKIDGSDYFLDKIEREDFLRKQRTFDNGSIPHQIHLQEMHAILRRQGEHYAFLKENQAKIEKILTFRIPYYVGPLARKNSRFAWAEYHSDEKITPWNFDEIIDKEKSAEKFITRMTLNDLYLPEEKVLPKHSLVYETYTVYNELTKVKYVNEQGKSNFFDANMKQEIFEHVFKENRKVTKDKFLNYLNKEFPEYRIQDLIGLDKENKSFNASLGTYHDLKKILDKSFLDDKTNETIIEDIIQTLTLFEDRDMIRQRLQKYSDIFTPQQLKKLERRHYTGWGRLSYKLINGIRNKENGKSILDYLIDDGYANRNFMQLISDDTLPFKQIIKDAQIIGDIDDVTSVVRELPGSPAIKKGILQSVKIVDELVKVMGHNPDNIVIEMARENQTTNRGRNQSQQRLKKLQDSLKELGSNILNEEKPSYIEGKVENNHLQDDRLFLYYIQNGKDMYTGDELDIDHLSDYDIDHIIPQAFIKDDSIDNRVLTSSAKNRGKSDDVPSLDIVHDRKADWIRLYKSGLISKRKFDNLTKAERGGLTENDKAGFIKRQLVETRQITKHVAQILDSRFNTERDENDKVIRNVKVITLKSNLVSQFRKDFKFYKVREINDYHHAHDAYLNAVVGTALLKKYPKLAPEFVYGEYKKYDIRKFITSSGDKATAKYFFYSNLMNFFKRVIRYSNGKVVVRPVIECSKDTGEIAWNKQTDFEKVRRVLSYPQVNIVKKVETQTGGFSKESILPKGNSDKLIPRKTKKFRWDTPKYGGFDSPNIAYSVFVIADVEKGKAKKLKTVKELVGISIMERSSFEENPVVFLEKKGYQNVQEDNLIKLPKYSLFEFEGGRRRLLASASELQKGNEVVLSRHLVELLYHAHRVNSFNNSEHLKYVSEHKKEFGEVLSCVENFAKSYVDVEKNLGKIRAVADKIDTFSIEDISISFVNLLTLTALGAPADFNFLGEKIPRKRYTSTKECLNATLIHQSITGLYETRIDLSKLGEE

SEQ ID NO: 113 - protein, 1372 aa, Streptococcus gallolyticus; identical to SEQ ID NO: 12

SEQ ID NO: 114 - protein, 1372 aa, Streptococcus infantarius; identical to SEQ ID NO: 12

SEQ ID NO: 115 - protein, 1368 aa, Streptococcus iniae
MRKPYSIGLDIGTNSVGWAVITDDYKVPSKKMRIQGTTDRTSIKKNLIGALLFDNGETAEATRLKRTTRRRYTRRKYRIKELQKIFSSEMNELDIAFFPRLSESFLVSDDKEFENHPIFGNLKDEITYHNDYPTIYHLRQTLADSDQKADLRLIYLALAHIIKFRGHFLIEGNLDSENTDVHVLFLNLVNIYNNLFEEDIVETASIDAEKILTSKTSKSRRLENLIAEIPNQKRNMLFGNLVSLALGLTPNFKTNFELLEDAKLQISKDSYEEDLDNLLAQIGDQYADLFIAAKKLSDAILLSDIITVKGASTKAPLSASMVQRYEEHQQDLALLKNLVKKQIPEKYKEIFDNKEKNGYAGYIDGKTSQEEFYKYIKPILLKLDGTEKLISKLEREDFLRKQRTFDNGSIPHQIHLNELKAIIRRQEKFYPFLKENQKKIEKLFTFKIPYYVGPLANGQSSFAWLKRQSNESITPWNFEEVVDQEASARAFIERMTNFDTYLPEEKVLPKHSPLYEMFMVYNELTKVKYQTEGMKRPVFLSSEDKEEIVNLLFKKERKVTVKQLKEEYFSKMKCFHTVTILGVEDRFNASLGTYHDLLKIFKDKAFLDDEANQDILEEIVWTLTLFEDQAMIERRLVKYADVFEKSVLKKLKKRHYTGWGRLSQKLINGIKDKQTGKTILGFLKDDGVANRNFMQLINDSSLDFAKIIKNEQEKTIKNESLEETIANLAGSPAIKKGILQSIKIVDEIVKIMGQNPDNIVIEMARENQSTMQGIKNSRQRLRKLEEVHKNTGSKILKEYNVSNTQLQSDRLYLYLLQDGKDMYTGKELDYDNLSQYDIDHIIPQSFIKDNSIDNTVLTTQASNRGKSDNVPNIETVNKMKSFWYKQLKSGAISQRKFDHLTKAERGALSDFDKAGFIKRQLVETRQITKHVAQILDSRFNSNLTEDSKSNRNVKIITLKSKMVSDFRKDFGFYKLREVNDYHHAQDAYLNAVVGTALLKKYPKLEAEFVYGDYKHYDLAKLMIQPDSSLGKATTRMFFYSNLMNFFKKEIKLADDTIFTRPQIEVNTETGEIVWDKVKDMQTIRKVMSYPQVNIVMKTEVQTGGFSKESIWPKGDSDKLIARKKSWDPKKYGGFDSPIIAYSVLVVAKIAKGKTQKLKTIKELVGIKIMEQDEFEKDPIAFLEKKGYQDIQTSSIIKLPKYSLFELENGRKRLLASAKELQKGNELALPNKYVKFLYLASHYTKFTGKEEDREKKRSYVESHLYYFDEIMQIIVEYSNRYILADSNLIKIQNLYKEKDNFSIEEQAINMLNLFTFTDLGAPSAFKFFNGDIDRKRYSSTNEIINSTLIYQSPTGLYETRIDLSKLGGK

SEQ ID NO: 116 - protein, 1273 aa, Streptococcus iniae
  misc_feature (1267)..(1267): Xaa can be any naturally occurring amino acid
MRKPYSIGLDIGTNSVGWAVITDDYKVPSKKMRIQGTTDRTSIKKNLIGALLFDNGETAEATRLKRTTRRRYTRRKYRIKELQKIFSSEMNELDIAFFPRLSESFLVSDDKEFENHPIFGNLKDEITYHNDYPTIYHLRQTLADSDQKADLRLIYLALAHIIKFRGHFLIEGNLDSENTDVHVLFLNLVNIYNNLFEEDIVETASIDAEKILTSKTSKSRRLENLIAEIPNQKRNMLFGNLVSLALGLTPNFKTNFELLEDAKLQISKDSYEEDLDNLLAQIGDQYADLFIAAKKLSDAILLSDIITVKGASTKAPLSASMVQRYEEHQQDLALLKNLVKKQIPEKYKEIFDNKEKNGYAGYIDGKTSQEEFYKYIKPILLKLDGTEKLISKLEREDFLRKQRTFDNGSIPHQIHLNELKAIIRRQEKFYPFLKENQKKIEKLFTFKIPYYVGPLANGQSSFAWLKRQSNESITPWNFEEVVDQEASARAFIERMTNFDTYLPEEKVLPKHSPLYEMFMVYNELTKVKYQTEGMKRPVFLSSEDKEEIVNLLFKKERKVTVKQLKEEYFSKMKCFHTVTILGVEDRFNASLGTYHDLLKIFKDKAFLDDEANQDILEEIVWTLTLFEDQAMIERRLVKYADVFEKSVLKKLKKRHYTGWGRLSQKLINGIKDKQTGKTILGFLKDDGVANRNFMQLINDSSLDFAKIIKNEQEKTIKNESLEETIANLAGSPAIKKGILQSIKIVDEIVKIMGQNPDNIVIEMARENQSTMQGIKNSRQRLRKLEEVHKNTGSKILKEYNVSNTQLQSDRLYLYLLQDGKDMYTGKELDYDNLSQYDIDHIIPQSFIKDNSIDNTVLTTQASNRGKSDNVPNIETVNKMKSFWYKQLKSGAISQRKFDHLTKAERGALSDFDKAGFIKRQLVETRQITKHVAQILDSRFNSNLTEDSKSNRNVKIITLKSKMVSDFRKDFGFYKLREVNDYHHAQDAYLNAVVGTALLKKYPKLEAEFVYGDYKHYDLAKLMIQPDSSLGKATTRMFFYSNLMNFFKKEIKLADDTIFTRPQIEVNTETGEIVWDKVKDMQTIRKVMSYPQVNIVMKTEVQTGGFSKESIWPKGDSDKLIARKKSWDPKKYGGFDSPIIAYSVLVVAKIAKGKTQKLKTIKELVGIKIMEQDEFEKDPIAFLEKKGYQDIQTSSIIKLPKYSLFELENGRKRLLASAKELQKGNELALPNKYVKFLYLASHYTKFTGKEEDREKKRSYVESHLYYFXEVKSSF

SEQ ID NO: 117 - protein, 1267 aa, Streptococcus iniae
  misc_feature (1265)..(1265): Xaa can be any naturally occurring amino acid
  misc_feature (1267)..(1267): Xaa can be any naturally occurring amino acid
MRKPYSIGLDIGTNSVGWAVITDDYKVPSKKMRIQGTTDRTSIKKNLIGALLFDNGETAEATRLKRTTRRRYTRRKYRIKELQKIFSSEMNELDIAFFPRLSESFLVSDDKEFENHPIFGNLKDEITYHNDYPTIYHLRQTLADSDQKADLRLIYLALAHIIKFRGHFLIEGNLDSENTDVHVLFLNLVNIYNNLFEEDIVETASIDAEKILTSKTSKSRRLENLIAEIPNQKRNMLFGNLVSLALGLTPNFKTNFELLEDAKLQISKDSYEEDLDNLLAQIGDQYADLFIAAKKLSDAILLSDIITVKGASTKAPLSASMVQRYEEHQQDLALLKNLVKKQIPEKYKEIFDNKEKNGYAGYIDGKTSQEEFYKYIKPILLKLDGTEKLISKLEREDFLRKQRTFDNGSIPHQIHLNELKAIIRRQEKFYPFLKENQKKIEKLFTFKIPYYVGPLANGQSSFAWLKRQSNESITPWNFEEVVDQEASARAFIERMTNFDTYLPEEKVLPKHSPLYEMFMVYNELTKVKYQTEGMKRPVFLSSEDKEEIVNLLFKKERKVTVKQLKEEYFSKMKCFHTVTILGVEDRFNASLGTYHDLLKIFKDKAFLDDEANQDILEEIVWTLTLFEDQAMIERRLVKYADVFEKSVLKKLKKRHYTGWGRLSQKLINGIKDKQTGKTILGFLKDDGVANRNFMQLINDSSLDFAKIIKNEQEKTIKNESLEETIANLAGSPAIKKGILQSIKIVDEIVKIMGQNPDNIVIEMARENQSTMQGIKNSRQRLRKLEEVHKNTGSKILKEYNVSNTQLQSDRLYLYLLQDGKDMYTGKELDYDNLSQYDIDHIIPQSFIKDNSIDNTVLTTQASNRGKSDNVPNIETVNKMKSFWYKQLKSGAISQRKFDHLTKAERGALSDFDKAGFIKRQLVETRQITKHVAQILDSRFNSNLTEDSKSNRNVKIITLKSKMVSDFRKDFGFYKLREVNDYHHAQDAYLNAVVGTALLKKYPKLEAEFVYGDYKHYDLAKLMIQPDSSLGKATTRMFFYSNLMNFFKKEIKLADDTIFTRPQIEVNTETGEIVWDKVKDMQTIRKVMSYPQVNIVMKTEVQTGGFSKESIWPKGDSDKLIARKKSWDPKKYGGFDSPIIAYSVLVVAKIAKGKTQKLKTIKELVGIKIMEQDEFEKDPIAFLEKKGYQDIQTSSIIKLPKYSLFELENGRKRLLASAKELQKGNELALPNKYVKFLYLASHYTKFTGKEEDREKKRSYVESHLYXFX

SEQ ID NO: 118 - protein, 200 aa, Streptococcus iniae
MEQDEFEKDPIAFLEKKGYQDIQTSSIIKLPKYSLFELENGRKRLLASAKELQKGNELALPNKYVKFLYLASHYTKFTGKEEDREKKRSYVESHLYYFDEIMQIIVEYSNRYILADSNLIKIQNLYKEKDNFSIEEQAINMLNLFTFTDLGAPSAFKFFNGDIDRKRYSSTNEIINSTLIYQSPTGLYETRIDLSKLGGK

SEQ ID NO: 119 - protein, 1281 aa, Streptococcus iniae
MRKPYSIGLDIGTNSVGWAVITDDYKVPSKKMRIQGTTDRTSIKKNLIGALLFDNGETAEATRLKRTTRRRYTRRKYRIKELQKIFSSEMNELDIAFFPRLSESFLVSDDKEFENHPIFGNLKDEITYHNDYPTIYHLRQTLADSDQKADLRLIYLALAHIIKFRGHFLIEGNLDSENTDVHVLFLNLVNIYNNLFEEDIVETASIDAEKILTSKTSKSRRLENLIAEIPNQKRNMLFGNLVSLALGLTPNFKTNFELLEDAKLQISKDSYEEDLDNLLAQIGDQYADLFIAAKKLSDAILLSDIITVKGASTKAPLSASMVQRYEEHQQDLALLKNLVKKQIPEKYKEIFDNKEKNGYAGYIDGKTSQEEFYKYIKPILLKLDGTEKLISKLEREDFLRKQRTFDNGSIPHQIHLNELKAIIRRQEKFYPFLKENQKKIEKLFTFKIPYYVGPLANGQSSFAWLKRQSNESITPWNFEEVVDQEASARAFIERMTNFDTYLPEEKVLPKHSPLYEMFMVYNELTKVKYQTEGMKRPVFLSSEDKEEIVNLLFKKERKVTVKQLKEEYFSKMKCFHTVTILGVEDRFNASLGTYHDLLKIFKDKAFLDDEANQDILEEIVWTLTLFEDQAMIERRLVKYADVFEKSVLKKLKKRHYTGWGRLSQKLINGIKDKQTGKTILGFLKDDGVANRNFMQLINDSSLDFAKIIKNEQEKTIKNESLEETIANLAGSPAIKKGILQSIKIVDEIVKIMGQNPDNIVIEMARENQSTMQGIKNSRQRLRKLEEVHKNTGSKILKEYNVSNTQLQSDRLYLYLLQDGKDMYTGKELDYDNLSQYDIDHIIPQSFIKDNSIDNTVLTTQASNRGKSDNVPNIETVNKMKSFWYKQLKSGAISQRKFDHLTKAERGALSDFDKAGFIKRQLVETRQITKHVAQILDSRFNSNLTEDSKSNRNVKIITLKSKMVSDFRKDFGFYKLREVNDYHHAQDAYLNAVVGTALLKKYPKLEAEFVYGDYKHYDLAKLMIQPDSSLGKATTRMFFYSNLMNFFKKEIKLADDTIFTRPQIEVNTETGEIVWDKVKDMQTIRKVMSYPQVNIVMKTEVQTGGFSKESIWPKGDSDKLIARKKSWDPKKYGGFDSPIIAYSVLVVAKIAKGKTQKLKTIKELVGIKIMEQDEFEKDPIAFLEKKGYQDIQTSSIIKLPKYSLFELENGRKRLLASAKELQKGNELALPNKYVKFLYLASHYTKFTGKEEDREKKRSYVESHLYYFDVRLSQVFRVTNVEF

SEQ ID NO: 120 - protein, 1345 aa, Streptococcus intermedius
MKKPYSIGLDIGTNSVGWAVVTDDYKVPAKKMKVLGNTDKSHIKKNLLGALLFDSGNTAEDRRLKRTARRRYTRRRNRILYLQEIFSEEMGKVDDSFFHRLEDSFLVTEDKRGERHPIFGNLEEEVKYHENFPTIYHLRQYLADNPEKTDLRLVYLALAHIIKFRGHFLIEGKFDTRNNDVQRLFQEFLAVYDNTFENSSLQEQNVQVEEILTDKISKSAKKDRVLKLFPNEKSNGRFAEFLKLIVGNQADFKKHFELEEKAPLQFSKDTYEEELEVLLAQIEDNYAELFLSAKKLYDSILLSGILTVTDVSTKAPLSASMIQRYNEHQMDLAQLKQFIRQKLSDKYNEVFSDVSKDGYAGYIDGKTNQEAFYKYLKGLLNKIEGSGYFLDKIEREDFLRKQRTFDNGSIPHQIHLQEMRAIIRRQAEFYPFLADNQDRIEKILTFRIPYYIGPLARGKSDFSWLSRKSADKITPWNFDEIVDKESSAEAFINRMTNYDLYLPNQKVLPRHSLLYEKFTVYNELTKVKYKTEQGKTAFFDANMKQEIFDGVFKVYRKVTKDKLMDFLEKEFDEFRIVDLTGLDKENKAFNASYGTYHDLRKILDKDFLDNSKNEKILEDIVLTLTLFEDREMIRKRLENYSDLLTKEQVKNLERRHYTGWGRLSAELIHGIRNKESRKTILDYLIDDGNSNRNFMQLINDDALSFKEEIAKAQVIGETDNLNQVVSDIAGSPAIKKGILQSLKIVDELVKIMGHQPENIVVEMARENQFTNQGRRNSQQRLKGLTDSIKEFGSQILKEHPVENSQLQNDRLFLYYLQNGRDMYTGEELDIDYLSQYDIDHIIPQAFIKDNSIDNRVLTSSKENRGKSDDVPSKDVVRKMKSYWSKLLSAKLITQRKFDNLTKAERGGLTDDDKAGFIKRQLVETRQITKHVARILDERFNTETDENNKKIRQVKIVTLKSNLVSNFRKEFELYKVREINDYHHAHDAYLNAVIGKALLGVYPQLEPEFVYGDYPHFHGHKENKATAKKFFYSNIMNFFKKDDVRTDKNGEIIWKKDEHISNIKKVLSYPQVNIVKKVEEQTGGFSKESILPKGNSDKLIPRKTKKFYWDTKKYGGFDSPIVAYSILVIANIEKGKSKKLKLVKDLVGITIMERTIFEKNPVAFLERKGYRNVQEENIVKLPKYSLFELENGRRRLLASARELQKGNEIVLPNHLGTMLYHAKNIHKVDEPKHLDYVKKHKDEFKELLDVVSNFSKKNILAESNLEKIEELYAQNNNKDITELASSFINLLTFTAIGAPAAFKFFDNNIDRKRYTSTTEILNATLIHQSITGLYETRIDLSRLGGD

SEQ ID NO: 121 - protein, 1353 aa, Streptococcus massiliensis
MKKPYSIGLDIGTNSVGWAVVMEDYKVPSKKMKVLGNTDKQSIKKNLIGALLFDSGETAVERRLNRTTSRRYDRRRNRIRYLQHIFAEEMNRADENFFHRLKESFFVEEDKTYSKYPIFGTLEEEKNYHKNYPTIYHLRKTLADTPDKMDIRLIYLALAHIIKYRGHFLIEGDLDIENIGIQDSFKSFIEEYNTQFGTKLDSTTKVEAIFTENSSKAKRVETILGLFPDETAAGNLDKFLKLMLGNQADFKKVFDLEEKITLQFSKDSYEEDLELLLSKIDEEYAALFDLAKKVYDAVLLSNILTVKEKNTKAPLSASMIKRYEEHKDDLKAFKRFFRERLPEKYETMFKDLTKPSYAAYVSGLYKKDAKRGLVPTSKRVTEDDFYKFSKGLLIDVEGAEYFLEKIEREDFLRKQRTFDNGAIPNQVHVKELQAIILNQSKYYPFLAENKEKIEKILTFRIPYYVGPLARGNSSFAWLQRKSDEAIRPWNFEQVVDMETSASRFIERMTLHDLYLPDEKVLPRHSLIYEKYTVFNELTKVRFTPEGGKEVYFSKTDKENIFDSLFKRYRKVTKRKLKDFIEKELGYGYIDIDNIKGVEEQFNASYTTYQDLLKIIGDKEFLDNEENKDLLEEIIYILTVFEDRKMIEKRLSELNIPFENKIIKKLARKKYTGWGNLSRKLIDGIRNRETNRTILGHLIDDGFSNRNLMQLINDDGLDFKEIIRKAQTIENIDTNQALVSSLPGSPAIKKGILQSLNIVDEIIAIMGYAPTNIVIEMARENQTTQKGRDNSAQRLKKIEDGIKLLGSDLLKQNPIQDNKDLQKEKLFLYYMQNGIDLYTGQPLNCDPDSLAFYDVDHIVPRSYIKNDSFDNKVLTTSKGNRKKLDDVPAKEVVEKMENTWRRLHAAGLISDIKLSYLMKGELTEEDKAGFIRRQLVETRQITKHVARLLDEKLNRKKNENGEKLRTTKIITLKSVFASRFRANFDLYKLRELNHYHHAHDAYLNAVVAQALLKVYPKFERELVYGSYVKESIFSRKISATERMRMYNNILKFISKDKKVDQETGEIVWDKKEIENIVKKVIYSSPVNIVKKREEQSGALFKQSNMAVGYNNKLIPRKKDWSVDKYGGFIEPAESYSLAIFYTDINGKKPKKKSTIIAISRMEKKDYEKEPERFLAQKGFERVEKTIKLPKYSLFEMEKGRRRLLASSGELQKGNQVLLPEHLIRLLSYAKKVDVLVKSKDDDYDLEEHRAEFAELLDCIKKFNDMYILASSNMSKIEEIYQKNIDAPIEEVARSFVALLNFTMMGAATDFKFFGQIIPRKRYPSTTECLKSTLIHQSVTGLYETRIDLSKLGEN

SEQ ID NO: 122 - protein, 1376 aa, Streptococcus mitis
MNNKPYSIGLDIGTNSVGWAVITDDYKVPSKKMKVLGNTDKHFIKKNLLGALLFDEGTTAEDRRLKRTARRRYTRRKNRLRYLQEIFTEEMSKVDISFFHRLDDSFLVPEDKRGSKYPIFATLEEEKEYHKNFPTIYHLRKHLADSKEKADFRLIYLALAHIIKYRGHFLYEESFDIKNNDIQKIFNEFISIYDNTFEGSSLNGQNAQVEAIFTDKISKSAKRERVLKLFPDEKSTGLFSEFLKLIVGNQADFKKHFDLEEKAPLQFSKDTYDEDLENLLVQIGDDFADLFLVAKKLYDAILLSGILTVTDPSTKAPLSASMIDRYENHQKDLAALKQFIKTNLPEKYDEVFSDQSKDGYAGYIDGKTTQEAFYKYIKNLLSKLEGADYFLDKIEREDFLRKQRTFDNGSIPHQIHLQEMNAIIRRQGEHYPFLQENKEKIEKILTFRIPYYVGPLARGNRDFAWLTRNSDQAIRPWNFEEIVDKARSAEDFINKMTNYDLYLPEEKVLPKHSLLYETFAVYNELTKVKFIAEGLRDYQFLDSGQKQQIVTQLFKEKRKVTEKDIIQYLHNVDSYDGIELKGIEKQFNASLSTYHDLLKIIKDKEFMDDSKNEAILENIVHTLTIFEDREMIKQRLAHYASIFDEKVIKALTRRHYTGWGKLSAKLINGIYDKQSKKTILDYLIDDGEINRNFMQLINDDGLSFKEIIQKAQVVGKTNDVKQVVQELPGSPAIKKGILQSIKLVDELVKVMGHAPESIVIEMARENQTTARGKKNSQQRYKRIEDALKNLAHGLDSNILKEHPTDNIQLQNDRLFLYYLQNGKDMYTGKSLDINQLSSCDIDHIIPQAFIKDDSLDNRVLTSSKDNRGKSDNVPSLEIVQKRKAFWQQLLDSKLISERKFNNLTKAERGGLDERDKVGFIKRQLVETRQITKHVAQILDARFNTEVTEKDKKDRSVKIITLKSNLVSNFRKEFRLYKVREINDYHHAHDPYLNAVVAKAILKKYPKLEPEFVYGDYQKYDLKRYISRTKDPKEVEKATEKYFFYSNLLNFFKEEVHYADGTIVKRENIEYSKDTGEIAWNKEKDFATIKKVLSLPQVNIVKKTEEQTVGQNGGLFDNNIVSKKKVVDASKLTPIKSGLSPEKYGGYARPTIAYSVLVIADIEKGKAKKLKRIKEMVGITVQDKKKFEANPIAYLEECGYKNINPNLIIKLPKYSLFEFNNGQRRLLASSIELQKGNELIVPYHFTALLYHAQRINKISEPIHKQYVETHQSEFKELLTAIISLSKKYIQKPNVESLLQQAFDQSDKDIYQLSESFISLLKLISFGAPGTFKFLGVEISQSNVRYQSVSSCFNATLIHQSITGLYETRIDLSKLGED

SEQ ID NO: 123 - protein, 1370 aa, Streptococcus mitis; identical to SEQ ID NO: 13

SEQ ID NO: 124 - protein, 1345 aa, Streptococcus mutans
MKKPYSIGLDIGTNSVGWAVVTDDYKVPAKKMKVLGNTDKSHIEKNLLGALLFDSGNTAEDRRLKRTARRRYTRRRNRILYLQEIFSEEMGKVDDSFFHRLEDSFLVTEDKRGERHPIFGNLEEEVKYHENFPTIYHLRQYLADNPEKVDLRLVYLALAHIIKFRGHFLIEGKFDTRNNDVQRLFQEFLAVYDNTFENSSLQEQNVQVEEILTDKISKSAKKDRVLKLFPNEKSNGRFAEFLKLIVGNQADFKKHFELEEKAPLQFSKDTYEEELEVLLAQIGDNYAELFLSAKKLYDSILLSGILTVTDVGTKAPLSASMIQRYNEHQMDLAQLKQFIRQKLSDKYNEVFSDVSKDGYAGYIDGKTNQEAFYKYLKGLLNKIEGSGYFLDKIEREDFLRKQRTFDNGSIPHQIHLQEMRAIIRRQAEFYPFLADNQDRIEKLLTFRIPYYVGPLARGKSDFAWLSRKSADKITPWNFDEIVDKESSAEAFINRMTNYDLYLPNQKVLPKHSLLYEKFTVYNELTKVKYKTEQGKTAFFDANMKQEIFDGVFKVYRKVTKDKLMDFLEKEFDEFRIVDLTGLDKENKVFNASYGTYHDLCKILDKDFLDNSKNEKILEDIVLTLTLFEDREMIRKRLENYSDLLTKEQVKKLERRHYTGWGRLSAELIHGIRNKESRKTILDYLIDDGNSNRNFMQLINDDALSFKEEIAKAQVIGETDNLNQVVSDIAGSPAIKKGILQSLKIVDELVKIMGHQPENIVVEMARENQFTNQGRRNSQQRLKGLTDSIKEFGSQILKEHPVENSQLQNDRLFLYYLQNGRDMYTGEELDIDYLSQYDIDHIIPQAFIKDNSIDNRVLTSSKENRGKSDDVPSKDVVRKMKSYWSKLLSAKLITQRKFDNLTKAERGGLTDDDKAGFIKRQLVETRQITKHVARILDERFNTETDENNKKIRQVKIVTLKSNLVSNFRKEFELYKVREINDYHHAHDAYLNAVIGKALLGVYPQLEPEFVYGDYPHFHGHKENKATAKKFFYSNIMNFFKKDDVRTDKNGEIIWKKDEHISNIKKVLSYPQVNIVKKVEEQTGGFSKESILPKGNSDKLIPRKTKKFYWDTKKYGGFDSPIVAYSILVIADIEKGKSKKLKTVKALVGVTIMEKMTFERDPVAFLERKGYRNVQEENIIKLPKYSLFKLENGRKRLLASARELQKGNEIVLPNHLGTLLYHAKNIHKVDEPKHLDYVDKHKDEFKELLDVVSNFSKKYTLAEGNLEKIKELYAQNNGEDLKELASSFINLLTFTAIGAPATFKFFDKNIDRKRYTSTTEILNATLIHQSITGLYETRIDLNKLGGD

SEQ ID NO: 125 - protein, 1345 aa, Streptococcus mutans
MKKPYSIGLDIGTNSVGWAVVTDDYKVPAKKMKVLGNTDKSHIEKNLLGALLFDSGNTAEDRRLKRTARRRYTRRRNRILYLQEIFSEEMGKVDDSFFHRLEDSFLVTEDKRGERHPIFGNLEEEVKYHENFPTIYHLRQYLADNPEKVDLRLVYLALAHIIKFRGHFLIEGKFDTRNNDVQRLFQEFLAVYDNTFENSSLQEQNVQVEEILTDKISKSAKKDRVLKLFPNEKSNGRFAEFLKLIVGNQADFKKHFELEEKAPLQFSKDTYEEELEVLLAQIGDNYAELFLSAKKLYDSILLSGILTVTDVGTKAPLSASMIQRYNEHQMDLAQLKQFIRQKLSDKYNEVFSDVSKDGYAGYIDGKTNQEAFYKYLKGLLNKIEGSGYFLDKIEREDFLRKQRTFDNGSIPHQIHLQEMRAIIRRQAEFYPFLADNQDRIEKLLTFRIPYYVGPLARGKSDFAWLSRKSADKITPWNFDEIVDKESSAEAFINRMTNYDLYLPNQKVLPKHSLLYEKFTVYNELIKVKYKTEQGKTAFFDANMKQEIFDGVFKVYRKVTKDKLMDFLEKEFDEFRIVDLTGLDKENKVFNASYGTYHDLCKILDKDFLDNSKNEKILEDIVLTLTLFEDREMIRKRLENYSDLLTKEQVKKLERRHYTGWGRLSAELIHGIRNKESRKTILDYLIDDGNSNRNFMQLINDDALSFKEEIAKAQVIGETDNLNQVVSDIAGSPAIKKGILQSLKIVDELVKIMGHQPENIVVEMARENQFTNQGRRNSQQRLKGLTDSIKEFGSQILKEHPVENSQLQNDRLFLYYLQNGRDMYTGEELDIDYLSQYDIDHIIPQAFIKDNSIDNRVLTSSKENRGKSDDVPSKDVVRKMKSYWSKLLSAKLITQRKFDNLTKAERGGLTDDDKAGFIKRQLVETRQITKHVARILDERFNTETDENNKKIRQVKIVTLKSNLVSNFRKEFELYKVREINDYHHAHDAYLNAVIGKALLGVYPQLEPEFVYGDYPHFHGHKENKATAKKFFYSNIMNFFKKDDVRTDKNGEIIWKKDEHISNIKKVLSYPQVNIVKKVEEQTGGFSKESILPKGNSDKLIPRKTKKFYWDTKKYGGFDSPIVAYSILVIADIEKGKSKKLKTVKALVGVTIMEKMTFERDPVAFLERKGYRNVQEENIIKLPKYSLFKLENGRKRLLASARELQKGNEIVLPNHLGTLLYHAKNIHKVDEPKHLDYVDKHKDEFKELLDVVSNFSKKYTLAEGNLEKIKELYAQNNGEDLKELASSFINLLTFTAIGAPATFKFFDKNIDRKRYTSTTEILNATLIHQSITGLYETRIDLNKLGGD

SEQ ID NO: 126 - protein, 1345 aa, Streptococcus mutans
MKKPYSIGLDIGTNSVGWAVVTDDYKVPAKKMKVLGNTDKSHIKKNLLGALLFDSGNTAEDRRLKRTARRRYTRRRNRILYLQEIFSEEMGKVDDSFFHRLDESFLTDDDKNFDSYPIFGNKAEEDAYHQKFPTIYHLRKHLADSTEKADLRLVYLALAHMIKFRGHFLIEGELNAENTDVQKLFADFVGVYDRTFDDSHLSEITVDASSILTEKISKSRRLEKLINNYPKEKKNTLFRNLVALSLGLQPNFKTNFKLSEDAKLQFSKDTYEEDLEELLGKIGDDYADLFTLAKNLYDAILLSGILTADDSSTKAPLSASMIKRYAEHHEDLEKLKEFIKANKPELYHDIFKDETKNGYAGYIENGVKQDEFYKYLKNTLSKIAGSDYFLDKIEREDFLRKQRTFDNGSIPHQIHLQEMHAILRRQGDYYPFLKENQDRIEKILTFRIPYYVGPLARGKSDFAWLSRKSADKITPWNFDEIVDKESSVEAFINRMTNYDLYLPNQKVLPKHSLLYEKFTVYNELTKVKYKTEQGKTAFFDANMKQEIFDGVFKVYRKVTKDKLMDFLEKEFDEFRIVDLTGLDKENKAFNASYGTYHDLRKILDKDFLDNSKNEKILEDIVLTLTLFEDREMIRKRLKNYSDLLTKEQLKKLERRHYTGWGRLSAELIHGIRNKESRKTILDYLIDDGNSNRNFMQLINDDALSFKEEIAKAQVIGETDNLNQVVSDIAGSPAIKKGILQSLKIVDELVKIMGHQPENIVVEMARENQFTNQGRRNSQQRLKGLTDSIKEFGSQILKEHPVENSQLQNDRLFLYYLQNGRDMYTGEELDIDYLSQYDIDHIIPQAFIKDNSIDNRVLTSSKENRGKSDDVPSKDVVRKMKSYWSKLLSAKLITQRKFDNLTKGERGGLTDDDKAGFIKRQLVETRQITKHVARILDERFNTETDENNKKIRQVKIVTLKSNLVSNFRKEFELYKVREINDYHHAHDAYLNAVIGKALLGVYPQLEPEFVYGDYPHFHGHKENKATAKKFFYSNIMNFFKKDDVRTDKNGEIIWKKDEYISNIKKVLSYPQVNIVKKVEEQTGGFSKESILPKGDSDKLIPRKTKKFYWDTKKYGGFDSPIVAYSILVIADIEKGKSKKLKTVKALVGVTIMEKMTFERDPVAFLERKGYRNVQEENIIKLPKYSLFKLENGRKRLLASARELQKGNEIVLPNHLGTLLYHAKNIHKVDEPKHLDYVDKHKDEFKELLDVVSNFSKKYTLAEGNLEKIKELYAQNNGEDLKELASSFINLLTFTAIGAPATFKFFDKNIDRKRYTSTTEILNATLIHQSITGLYETRIDLSKLGGD

SEQ ID NO: 127 - protein, 1345 aa, Streptococcus mutans
MKKPYSIGLDIGTNSVGWAVVTDDYKVPAKKMKVLGNTDKSHIKKNLLGALLFDSGNTAEDRRLKRTARRRYTRRRNRILYLQEIFSEEMGKVDDSFFHRLEDSFLVTEDKRGERHPIFGNLEEEVKYHENFPTIYHLRQYLADNPEKTDLRLVYLALAHIIKFRGHFLIEGKFDTRNNDVQRLFQEFLAVYDNTFENSSLQEQNVQVEEILTDKISKSAKKDRVLKLFPNEKSNGRFAEFLKLIVGNQADFKKHFELEEKAPLQFSKDIYEEELEVLLAQIGDNYAELFLSAKKLYDSILLSGILTVTDVSTKAPLSASMIQRYNEHQMDLAQLKQFIRQKLSDKYNEVFSDVSKDGYAGYIDGKTNQEAFYKYLKGLLNKIEGSGYFLDKIEREDFLRKQRTFDNGSIPHQIHLQEMRAIIRRQAEFYPFLADNQDRIEKILTFRIPYYVGPLARGKSDFAWLSRKSADKITPWNFDEIVDKESSVEAFINRMTNYDLYLPNQKVLPKHSLLYEKFTVYNELTKVKYKTEQGKTAFFDANMKQEIFDGVFKVYRKVTKDKLMDFLEKEFDEFRIVDLTGLDKENKAFNASYGTYHDLRKILDKDFLDNSKNEKILEDIVLTLTLFEDREMIRKRLKNYSDLLTKEQLKKLERRHYTGWGRLSAELIHGIRNKESRKTILDYLIDDGNSNRNFMQLINDDALSFKEEIAKAQVIGETDNLNQVVSDIAGSPAIKKGILQSLKIVDELVKIMGHQPENIVVEMARENQFTNQGRRNSQQRLKGLTDSIKEFGSQILKEHPVENSQLQNDRLFLYYLQNGRDMYTGEELDIDYLSQYDIDHIIPQAFIKDNSIDNRVLTSSKENRGKSDDVPSKDVVRKMKSYWSKLLSAKLITQRKFDNLTKAERGGLTDDDKAGFIKRQLVETRQITKHVARILDERFNTETDENNKKIRQVKIVTLKSNLVSNFRKEFELYKVREINDYHHAHDAYLNAVIGKALLGVYPQLEPEFVYGDYPHFHGHKENKATAKKFFYSNIMNFFKKDDVRTDKNGEIIWKKDEHISNIKKVLSYPQVNIVKKVEEQTGGFSKESILPKGNSDKLIPRKTKKFYWDTKKYGGFDSPIVAYSILVIADIEKGKSKKLKTVKALVGVTIMEKMTFERDPVAFLERKGYRNVQEENIIKLPKYSLFKLENGRKRLLASARELQKGNEIVLPNHLGTLLYHAKNIHKVDEPKHLDYVDKHKDEFKELLDVVSNFSKKYTLAEGNLEKIKELYAQNNGEDLKELASSFINLLTFTAIGAPATFKFFDKNIDRKRYTSTTEILNATLIHQSITGLYETRIDLNKLGGD

SEQ ID NO: 128 - protein, 1345 aa, Streptococcus mutans
MKKPYSIGLDIGTNSVGWAVVTDDYKVPAKKMKVLGNTDKSHIKKNLLGALLFDSGNTAEDRRLKRTARRRYTRRRNRILYLQEIFSEEMGKVDDSFFHRLEDSFLVTEDKRGERHPIFGNLEEEVKYHENFPTIYHLRQYLADNPEKVDLRLVYLALAHIIKFRGHFLIEGKFDTRNNDVQRLFQEFLAVYDNTFENSSLQEQNVQVEEILTDKISKSAKKDRVLKLFPNEKSNGRFAEFLKLIVGNQADFKKHFELEEKAPLQFSKDTYEEELEVLLAQIGDNYAELFLSAKKLYDSILLSGILTVTDVSTKAPLSASMIQRYNEHQMDLAQLKQFIRQKLSDKYNEVFSDVSKDGYAGYIDGKTNQEAFYKYLKGLLNKIEGSGYFLDKIEREDFLRKQRTFDNGSIPHQIHLQEMRAIIRRQAEFYPFLADNQDRIEKILTFRIPYYVGPLARGKSDFAWLSRKSADKITPWNFDEIVDKESSAEAFINRMTNYDLYLPNQKVLPKHSLLYEKFTVYNELTKVKYKTEQGKTAFFDANMKQEIFDGVFKVYRKVTKDKLMDFLEKEFDEFRIVDLTGLDKENKVFNASYGTYHDLCKILDKDFLDNSKNEKILEDIVLTLTLFEDREMIRKRLENYSDLLTKEQVKKLERRHYTGWGRLSAELIHGIRNKESRKTILDYLIDDGNSNRNFMQLINDDALSFKEEIAKAQVIGETDNLNQVVSDIAGSPAIKKGILQSLKIVDELVKIMGHQPENIVVEMARENQFTNQGRQNSQQRLKGLTDSIKEFGSQILKEHPVENSQLQNDRLFLYYLQNGRDMYTGEELDIDYLSQYDIDHIIPQAFIKDNSIDNRVLTSSKENRGKSDDVPSEDVVRKMKSYWSKLLSAKLITQRKFDNLTKAERGGLTDDDKAGFIKRQLVETRQITKHVARILDERFYTETDENNKKIRQVKIVTLKSNLVSNFRKEFELYKVREINDYHHAHDAYLNAVIGKALLGVYPQLEPEFVYGDYPHFHGHKENKATAKKFFYSNIMNFFKKDDVRTDKNGEIIWKKDEHISNIKKVLSYPQVNIVKKVEEQTGGFSKESILPKGNSDKLIPRKTKKFYWDTKKYGGFDSPIVAYSILVIADIEKGKSKKLKTVKALVGVTIMEKMTFERDPVAFLERKGYRNVQEENIIKLPKYSLFKLENGRKRLLASARELQKGNEIVLPNHLGTLLYHAKNIHKVDEPKHLDYVDKHKDEFKELLDVVSNFSKKYTLAEGNLEKIKELYAQNNGEDLKELASSFINLLTFTAIGAPATFKFFDKNIDRKRYTSTTEILNATLIHQSITGLYETRIDLSKLGGD

SEQ ID NO: 129 - protein, 1345 aa, Streptococcus mutans
MKKPYSIGLDIGTNSVGWAVVTDDYKVPAKKMKVLGNTDKSHIKKNLLGALLFDSGNTAEDRRLKRTARRRYTRRRNRILYLQEIFSEEMGKVDDSFFHRLEDSFLVTEDKRGERHPIFGNLEEEVKYHENFPTIYHLRQYLADNPEKVDLRLVYLALAHIIKFRGHFLIEGKFDTRNNDVQRLFQEFLAVYDNTFENSSLQEQNVQVEEILTDKISKSAKKDRVLKLFPNEKSNGRFAEFLKLIVGNQADFKKHFELEEKAPLQFSKDTYEEDLEELLGKIGDDYADLFTLAKNLYDAILLSGILTADDSSTKAPLSASMIQRYNEHQMDLAQLKQFIRQKLSDKYNEVFSDVSKDGYAGYIDGKTNQEAFYKYLKGLLNKIEGSGYFLDKIEREDFLRKQRTFDNGSIPHQIHLQEMRAIIRRQAEFYPFLADNQDRIEKILTFRIPYYVGPLARGKSDFAWLSRKSADKITPWNFDEIVDKESSAEAFINRMTNYDLYLPNQKVLPKHSLLYEKFTVYNELTKVKYKTEQGKTAFFDANMKQEIFDGVFKVYRKVTKDKLMDFLEKEFDEFRIVDLTGLDKENKVFNASYGTYHDLCKILDKDFLDNSKNEKILEDIVLTLTLFEDREMIRKRLENYSDLLTKEQVKKLERRHYTGWGRLSAELIHGIRNKESRKTILDYLIDDGNSNRNFMQLINDDALSFKEEIAKAQVIGETDNLNQVVSDIAGSPAIKKGILQSLKIVDELVKIMGHQPENIVVEMARENQFTNQGRRNSQQRLKGLTDSIKEFGSQILKEHPVENSQLQNDRLFLYYLQNGRDMYTGEELDIDYLSQYDIDHIIPQAFIKDNSIDNRVLTSSKENRGKSDDVPSKDVVRKMKSYWSKLLSAKLITQRKFDNLTKAERGGLTDDDKAGFIKRQLVETRQITKHVARILDERFYTETDENNKKIRQVKIVTLKSNLVSNFRKEFELYKVREINDYHHAHDAYLNAVIGKALLGVYPQLEPEFVYGDYPHFHGHKENKATAKKFFYSNIMNFFKKDDVRTDKNGEIIWKKDEHISNIKKVLSYPQVNIVKKVEEQTGGFSKESILPKGNSDKLIPRKTKKFYWDTKKYGGFDSPIVAYSILVIADIEKGKSKKLKTVKALVGVTIMEKMTFERDPVAFLERKGYRNVQEENIIKLPKYSLFKLENGRKRLLASARELQKGNEIVLPNHLGTLLYHAKNIHKVDEPKHLDYVDKHKDEFKELLDVVSNFSKKYTLAEGNLEKIKELYAQNNGEDLKELASSFINLLTFTAIGAPATFKFFDKNIDRKRYTSTTEILNATLIHQSITGLYETRIDLSKLGGD

SEQ ID NO: 130 - protein, 1345 aa, Streptococcus mutans
MKKPYSIGLDIGTNSVGWAVVTDDYKVPAKKMKVLGNTDKSHIKKNLLGALLFDSGNTAEDRRLKRTARRRYTRRRNRILYLQEIFSEEMGKVDDSFFHRLEDSFLVTEDKRGERHPIFGNLEEEVKYHENFPTIYHLRQYLADNPEKVDLRLVYLALAHIIKFRGHFLIEGKFDTRNNDVQRLFQEFLAVYDNTFENSSLQEQNVQVEEILTDKISKSAKKDRVLKLFPNEKSNGRFAEFLKLIVGNQADFKKHFELEEKAPLQFSKDTYEEDLEELLGKIGDDYADLFTLAKNLYDAILLSGILTADDSSTKAPLSASMIQRYNEHQMDLAQLKQFIRQKLSDKYNEVFSDVSKDGYAGYIDGKTNQEAFYKYLKGLLNKIEGSGYFLDKIEREDFLRKQRTFDNGSIPHQIHLQEMRAIIRRQAEFYPFLADNQDRIEKILTFRIPYYVGPLARGKSDFAWLSRKSADKITPWNFDEIVDKESSAEAFINRMTNYDLYLPNQKVLPKHSLLYEKFTVYNELTKVKYKTEQGKTAFFDANMKQEIFDGVFKVYRKVTKDKLMDFLEKEFDEFRIVDLTGLDKENKVFNASYGTYHDLCKILDKDFLDNSKNEKILEDIVLTLTLFEDREMIRKRLENYSDLLTKEQVKKLERRHYTGWGRLSAELIHGIRNKESRKTILDYLIDDGNSNRNFMQLINDDALSFKEEIAKAQVIGETDNLNQVVSDIAGSPAIKKGILQSLKIVDELVKIMGHQPENIVVEMARENQFTNQGRRNSQQRLKGLTDSIKEFGSQILKEHPVENSQLQNDRLFLYYLQNGRDMYTGEELDIDYLSQYDIDHIIPQAFIKDNSIDNRVLTSSKENRGKSDDVPSKDVVRKMKPYWSKLLSAKLITQRKFDNLTKAERGGLTDDDKAGFIKRQLVETRQITKHVARILDERFNTETDENNKKIRQVKIVTLKSNLVSNFRKEFELYKVREINDYHHAHDAYLNAVIGKALLGVYPQLEPEFVYGDYPHFHGHEENKATAKKFFYSNIMNFFKKDDVRTDKNGEIIWKKDEHISNIKKVLSYPQVNIVKKVEEQTGGFSKESILPKGNSDKLIPRKTKKFYWDTKKYGGFDSPIVAYSILVIADIEKGKSKKLKTVKALVGVTIMEKMTFERDPVAFLERKGYRNVQEENIIKLPKYSLFKLENGRKRLLASARELQKGNEIVLPNHLGTLLYHAKNIHKVDEPKHLDYVDKHKDEFKELLDVVSNFSKKYTLAEGNLEKIKELYAQNNGEDLKELASSFINLLTFTAIGAPATFKFFDKNIDRKRYTSTTEILNATLIHQSITGLYETRIDLSKLGGD

SEQ ID NO: 131 - protein, 1345 aa, Streptococcus mutans
MKKPYSIGLDIGTNSVGWAVVTDDYKVPAKKMKVLGNTDKSHIKKNLLGALLFDSGNTAEDRRLKRTARRRYTRRRNRILYLQEIFSEEMGKVDDSFFHRLEDSFLVTEDKRGERHPIFGNLEEEVKYHENFPTIYHLRQYLADNPEKVDLRLVYLALAHIIKFRGHFLIEGKFDTRNNDVQRLFQEFLAVYDNTFENSSLQEQNVQVEEILTDKISKSAKKDRVLKLFPNEKSNGRFAEFLKLIVGNQADFKKHFELEEKAPLQFSKDTYEEELEVLLAQIGDNYAELFLSAKKLYDSILLSGILTVTDVSTKAPLSASMIQRYNEHQMDLAQLKQFIRQKLSDKYNEVFSDVSKDGYAGYIDGKTNQEAFYKYLKGLLNKIEGSGYFLDKIEREDFLRKQRTFDNGSIPHQIHLQEMRAIIRRQAEFYPFLADNQDRIEKILTFRIPYYVGPLARGKSDFAWLSRKSADKITPWNFDEIVDKESSAEAFINRMTNYDLYLPNQKVLPKHSLLYEKFTVYNELTKVKYKTEQGKTAFFDANMKQEIFDGVFKVYRKVTKDKLMDFLEKEFDEFRIVDLTGLDKENKVFNASYGTYHDLCKILDKDFLDNSKNEKILEDIVLTLTLFEDREMIRKRLENYSDLLTKEQVKKLERRHYTGWGRLSAELIHGIRNKESRKTILDYLIDDGNSNRNFMQLINDDALSFKEEIAKAQVIGETDNLNQVVSDIAGSPAIKKGILQSLKIVDELVKIMGHQPENIVVEMARENQFTKQGRRNSQQRLKGLTDSIKEFGSQILKEHPVENSQLQNDRLFLYYLQNGRDMYTGEELDIDYLSQYDIDHIIPQAFIKDNSIDNRVLTSSKENRGKSDDVPSKDVVRKMKSYWSKLLSAKLITQRKFDNLTKAERGGLTDDDKAGFIKRQLVETRQITKHVARILDERFYTETDENNKKIRQVKIVTLKSNLVSNFRKEFELYKVREINDYHHAHDAYLNAVIGKALLGVYPQLEPEFVYGDYPHFHGHKENKATAKKFFYSNIMNFFKKDDVRTDKNGEIIWKKDEHISNIKKVLSYPQVNIVKKVEEQTGGFSKESILPKGNSDKLIPRKTKKFYWDTKKYGGFDSPIVAYSILVIADIEKGKSKKLKTVKALVGVTIMEKMTFERDPVAFLERKGYRNVQEENIIKLPKYSLFKLENGRKRLLASARELQKGNEIVLPNHLGTLLYHAKNIHKVDEPKHLDYVDKHKDEFKELLDVVSNFSKKYTLAEGNLEKIKELYAQNNGEDLKELASSFINLLTFTAIGAPATFKFFDKNIDRKRYTSTTEILNATLIHQSITGLYETRIDLSKLGGD

SEQ ID NO: 132 - protein, 1345 aa, Streptococcus mutans
MKKPYSIGLDIGTNSVGWAVVTDDYKVPAKKMKVLGNTDKSHIKKNLLGALLFDSGNTAADRRLKRTARRRYTRRRNRILYLQEIFAEEMSKVDDSFFHRLEDSFLVTEDKRGERHPIFGNLEEEVKYHENFPTIYHLRQYLADNPEKVDLRLVYLALAHIIKFRGHFLIEGKFDTRNNDVQRLFQEFLAVYDNTFENSSLQEQNVQVEEILTDKISKSAKKDRVLKLFPNEKSNGRFAEFLKLIVGNQADFKKHFELEEKAPLQFSKDTYEEELEVLLTQIGDNYAELFLSAKKLYDSILLSGILTVTDVSTKAPLSASMIQRYNEHQMDLAQLKQFIRQKLSDKYNEVFSDVSKDGYAGYIDGKTNQEAFYKYLKGLLNKIEGSGYFLDKIEREDFLRKQRTFDNGSIPHQIHLQEMRAIIRRQAEFYPFLADNQDRIEKILTFRIPYYVGPLARGKSDFAWLSRKSADKITPWNFDEIVDKESSAEAFINRMTNYDLYLPNQKVLPKHSLLYEKFTVYNELTKVKYKTEQGKTAFFDANMKQEIFDGVFKVYRKVTKDKLMDFLEKEFDEFRIVDLTGLDKENKAFNASYGTYHDLRKILDKDFLDNSKNEKILEDIVLTLTLFEDREMIRKRLENYSDLLTKEQVKKLERRHYTGWGRLSAELIHGIRNKESRKTLLDYLIDDGNSNRNFMQLINDDALSFKEEIAKAQVIGETDNLNQVVSDIAGSPAIKKGILQSLKIVDELVKIMGHQPENIVVEMARENQFTNQGRRNSQQRLKGLTDSIKEFGSQILKEHPVENSQLQNDRLFLYYLQNGRDMYTGEELDIDYLSQYDIDHIIPQAFIKDNSIDNRVLTSSKENRGKSDDVPSKDVVRKMKPYWSKLLSAKLITQRKFDNLTKAERGGLTDDDKAGFIKRQLVETRQITKHVARILDERFNTETDENNKKIRQVKIVTLKSNLVSNFRKEFELYKVREINDYHHAHDAYLNAVIGKALLGVYPQLEPEFVYGDYPHFHGHEENKATAKKFFYSNIMNFFKKDDVRTDKNGEIIWKKDEHISNIKKVLSYPQVNIVKKVEEQTGGFSKESILPKGNSDKLIPRKTKKFYWDTKKYGGFDSPIVAYSILVIADIEKGKSKKLKTVKALVGVTIMEKMTFERDPVAFLERKGYRNVQEENIIKLPKYSLFKLENGRKRLLASARELQKGNEIVLPNHLGTLLYHAKNIHKVDEPKHLDYVDKHKDEFKELLDVVSNFSKKYTLAEGNLEKIKELYAQNNGEDLKELSSSFINLLTFTAIGAPAAFKFFDKNIDRKRYTSTTEILNATLIHQSITGLYETRIDLSKLGGD

SEQ ID NO: 133 - protein, 1345 aa, Streptococcus mutans
MKKPYSIGLDIGTNSVGWAVVTDDYKVPAKKMKVLGNTDKSHIKKNLLGALLFDSGNTAEDRRLKRTARRRYTRRRNRILYLQEIFSEEMGKVDDSFFHRLEDSFLVTEDKRGERHPIFGNLEEEVKYHENFPTIYHLRQYLADNPEKVDLRLVYLALAHIIKFRGHFLIEGKFDTRNNDVQRLFQEFLAVYDNTFENSSLQEQNVQVEEILTDKISKSAKKDRVLKLFPNEKSNGRFAEFLKLIVGNQADFKKHFELEEKAPLQFSKDTYEEELEVLLAQIGDNYAELFLSAKKLYDSILLSGILTVTDVSTKAPLSASMIQRYNEHQMDLAQLKQFIRQKLSDKYNEVFSDVSKDGYAGYIDGKTNQEAFYKYLKGLLNKIEGSGYFLDKIEREDFLRKQRTFDNGSIPHQIHLQEMRAIIRRQAEFYPFLADNQDRIEKILTFRIPYYVGPLARGKSDFAWLSRKSADKITPWNFDEIVDKESSAEAFINRMTNYDLYLPNQKVLPKHSLLYEKFTVYNELTKVKYKTEQGKTAFFDANMKQEIFDGVFKVYRKVTKDKLMDFLEKEFDEFRIVDLTGLDKENKVFNASYGTYHDLCKILDKDFLDNSKNEKILEDIVLTLTLFEDREMIRKRLENYSDLLTKEQVKKLERRHYTGWGRLSAELIHGIRNKESRKTILDYLIDDGNSNRNFMQLINDDALSFKEEIAKAQVIGETDNLNQVVSDIAGSPAIKKGILQSLKIVDELVKIMGHQPENIVVEMARENQFTKQGRRNSQQRLKGLTDSIKEFGSQILKEHPVENSQLQNDRLFLYYLQNGRDMYTGEELDIDYLSQYDIDHIIPQAFIKDNSIDNRVLTSSKENRGKSDDVPSKDVVRKMKSYWSKLLSAKLITQRKFDNLTKAERGGLTDDDKAGFIKRQLVETRQITKHVARILDERFYTETDENNKKIRQVKIVTLKSNLVSNFRKEFELYKVREINDYHHAHDAYLNAVIGKALLGVYPQLEPEFVYGDYPHFHGHKENKATAKKFFYSNIMNFFKKDDVRTDRNGEIIWKKDEHISNIKKVLSYPQVNIVKKVEEQTGGFSKESILPKGNSDKLIPRKTKKFYWDTKKYGGFDSPIVAYSILVIADIEKGKSKKLKTVKALVGVTIMEKMTFERDPVAFLERKGYRNVQEENIIKLPKYSLFKLENGRKRLLASARELQKGNEIVLPNHLGTLLYHAKNIHKVDEPKHLDYVDKHKDEFKELLDVVSNFSKKYTLAEGNLEKIKELYAQNNGEDLKELASSFINLLTFTAIGAPATFKFFDKNIDRKRYTSTTEILNATLIHQSITGLYETRIDLSKLGGD

SEQ ID NO: 134 - protein, 1355 aa, Streptococcus mutans
MKKSYSIGLDIGTNSVGWAVVTDDYKVPAKKMKVLGNTDKSHIKKNLLGALLFDSGNTAEDRRLKRTARRRYTRRRNRILYLQEIFSEEMGKVDDSFFHRLDESFLTDDDKNFDSHPIFGNKAEEDAYHQKFPTIYHLRKHLADSTEKADLRLVYLALAHMIKFRGHFLIEGELNAENTDVQKLFADFVGVYDRTFDDSHLSEITVDASSILTEKISKSRRLEKLINNYPKEKKNTLFGNLIALSLGLQPNFKTNFKLSEDAKLQFSKDTYEEDLEELLGKIGDDYADLFTLAKNLYDAILLSGILTADDSSTKAPLSASMIKRYAEHHEDLEKLKEFIKANKPELYHDIFKDETKNGYAGYIENGVKQDEFYKYLKNTLSKIAGSDYFLDKIEREDFLRKQRTFDNGSIPHQIHLQEMHAILRRQGDYYPFLKENQDRIEKILTFRIPYYVGPLARKNSRFAWAEYHSDEAVMPWNFDQVIDKESSAQAFIEHMTNNDLYLPNEKVLPKHSPLYEKYTVYNELTKIKYVTEIGEAKFFDANLKQEIFDGLFKHERKVTKKKLRTFLDKNFDEFRIVDIQGLDKETETFNASYATYQDLLKVIKDKVFMDNPENAEILENIVLTLTLFEDREMIKQRLAKYADVFDKKVIDQLARRHYTGWGRLSAKLLNGIRDKQSCKTIMDYLIDDAQSNRNLMQLITDDNLTFKDDIVKAQYVDNSDDLHQVVQSLAGSPAIKKGILQSLKIVDELVKVMGKEPEQIVVEMARENQTTAKGRRNSQQRYKRLKEAIKSLDRDLNHKILKEHPTDNQALQNNRLFLYYLQNGRDMYTGESLDINRLSDYDIDHVIPQAFIKDNSIDNRVLTSSKANRGKSDDVPSEDVVNRMRPFWNKLLSSGLISQRKYNNLTKKELTPDDKAGFIKRQLVETRQITKHVARMLDERFNKEFDDNNKRIRRVKIVTLKSNLVSSFRKEFELYKVREINDYHHAHDAYLNAVVVKALLVKYPKLEPEFVYGEYPKYNSYRERKTATQKMFFYSNIMNMFKSKVKLADDQIVERPMIEVNDETGEIAWDKTKHITTVKKVLSYPQVNIVKKVEEQTIGQNGGLFDDNPKSPLEVIPSKLVPLKKALNPEKYGGYQKPTTAYPILLIVDTKQLIPISVMDKKRFEQNPVKFLKDKGYQQIEKNNFVKLPKYTLVDIGNGIKRLWASSKEVHKGNQLVVSKKSQDLLYHAHHLDNDYSNEYVKNHYQQFDILFNEITSFSKKCKLGKEHIQKIEEAYSKERDSASIEELADGFIKLLGFTQLGATSPFSFLGIKLNQKQYTGKKDYLLPCMEATLIHQSITGLYETRIDLNKLGGD

SEQ ID NO: 135 - protein, 1345 aa, Streptococcus mutans
MKKPYSIGLDIGTNSVGWAVVTDDYKVPAKKMKVLGNTDKSHIKKNLLGALLFDSGNTAADRRLKRTARRRYTRRRNRILYLQEIFAEEMSKVDDSFFHRLEDSFLVTEDKRGERHPIFGNLEEEVKYHENFPTIYHLRQYLADNPEKVDLRLVYLALAHIIKFRGHFLIEGKFDTRNNDVQRLFQEFLAVYDNTFENSSLQEQNVQVEEILTDKISKSAKKDRVLKLFPNEKSNGRFAEFLKLIVGNQADFKKHFELEEKAPLQFSKDTYEEELEVLLAQIGDNYAELFLSAKKLYDSILLSGILTVTDVSTKAPLSASMIQRYNEHQMDLAQLKQFIRQKLSDKYNEVFSDVSKDGYAGYIDGKTNQEAFYKYLKGLLNKIEGSGYFLDKIEREDFLRKQRTFDNGSIPHQIHLQEMRAIIRRQAEFYPFLADNQDRIEKILTFRIPYYVGPLARGKSDFAWLSRKSADKITPWNFDEIVDKESSAEAFINRMTNYDLYLPNQKVLPKHSLLYEKFTVYNELTKVKYKTEQGKTAFFDANMKQEIFDGVFKVYRKVTKDKLMDFLEKEFDEFRIVDLTGLDKENKAFNASYGTYHDLRKILDKDFLDNSKNEKILEDIVLTLTLFEDREMIRKRLENYSDLLTKEQVKKLERRHYTGWGRLSAELIHGIRNKESRKTILDYLIDDGNSNRNFMQLINDDALSFKEEIAKAQVIGETDNLNQVVSDIAGSPAIKKGILQSLKIVDELVKIMGHQPENIVVEMARENQFTNQGRRNSQQRLKGLTDSIKEFGSQILKEHPVEHSQLQNDRLFLYYLQNGRDMYTGEELDIDYLSQYDIDHIIPQAFIKDNSIDNRVLTSSKENRGKSDDVPSKNVVRKMKSYWSKLLSAKLITQRKFDNLTKAERGGLTDDDKAGFIKRQLVETRQITKHVARILDERFHTETDENNKKIRQVKIVTLKSNLVSNFRKEFELYKVREINDYHHAHDAYLNAVIGKALLGVYPQLEPEFVYGDYPHFHGHKENKATAKKFFYSNIMNFFKKDDVRTDKNGEIIWKKDEHISNIKKVLSYPQVNIVKKVEEQTGGFSKESILPKGNSDKLIPRKTKKFYWDTKKYGGFDSPIVAYSILVIADIEKGKSKKLKTVKALVGVTIMEKMTFERDPVAFLERKGYRNVQEENIIKLPKYSLFKLENGRKRLLASARELQKGNEIVLPNHLGTLLYHAKNIHKVDEPKHLDYVDKHKDEFKELLDVVSNFSKKYTLAEGNLEKIKELYAQNNGEDLKELASSFINLLTFTAIGAPATFKFFDKNIDRKRYTSTTEILNATLIHQSITGLYETRIDLSKLGGD

SEQ ID NO: 136 - protein, 1345 aa, Streptococcus mutans
MKKPYSIGLDIGTNSVGWAVVTDDYKVPAKKMKVLGNTDKSHIEKNLLGALLFDSGNTAEDRRLKRTARRRYTRRRNRILYLQEIFSEEMGKVDDSFFHRLEDFFLVTEDKRGERHPIFGNLEEEVKYHENFPTIYHLRQYLADNPEKVDLRLVYLALAHIIKFRGHFLIEGKFDTRNNDVQRLFQEFLAVYDNTFENSSLQEQNVQVEEILTDKISKSAKKDRVLKLFPNEKSNGRFAEFLKLIVGNQADFKKHFELEEKAPLQFSKDTYEEELEVLLAQIGDNYAELFLSAKKLYDSILLSGILTADDSSTKAPLSASMIQRYNEHQMDLAQLKQFIRQKLSDKYNEVFSDVSKDGYAGYIDGKTNQEAFYKYLKGLLNKIEGSGYFLDKIEREDFLRKQRTFDNGSIPHQIHLQEMRAIIRRQSEFYPFLADNQDRIEKILTFRIPYYVGPLARGKSDFAWLSRKSADKITPWNFDEIVDKESSAEAFINRMTNYDLYLPNQKVLPKHSLLYEKFTVYNELTKVKYKTEQGETAFFDANMKQEIFDGVFKVYRKVTKDKLMDFLEKEFDEFRIVDLTGLDKENKAFNASYGTYHDLRKILDKDFLDNSKNEKILEDIVLTLTLFEDREMIRKRLKNYSDLLTKEQLKKLERRHYTGWGRLSAELIHGIRNKESRKTILDYLIDDGNSNRNFMQLINDDALSFKEEIAKAQVIGETDNLNQVVSDIAGSPAIKKGILQSLKIVDELVKIMGHQPENIVVEMARENQFTNQGRRNSQQRLKGLTDSIKEFGSQILKEHPVENSQLQNDRLFLYYLQNGRDMYTGEELDIDYLSQYDIDHIIPQAFIKDNSIDNRVLTSSKENRGKSDDVPSKDVVRKMKPYWSKLLSAKLITQRKFDNLTKAERGGLTDDDKAGFIKRQLVETRQITKHVARILDERFNTETDENNKKIRQVKIVTLKSNLVSNFRKEFELYKVREINDYHHAHDAYLNAVIGKALLGVYPQLEPEFVYGDYPHFHGHEENKATAKKFFYSNIMNFFKKDDVRTDKNGEIIWKKDEHISNIKKVLSYPQVNIVKKVEEQTGGFSKESILPKGNSDKLIPRKTKKFYWDTKKYGGFDSPIVAYSILVIADIEKGKSKKLKTVKALVGVTIMEKMTFERDPVAFLERKGYRNVQEENIIKLPKYSLFKLENGRKRLLASARELQKGNEIVLPNHLGTLLYHAKNIHKVDEPKHLDYVDKHKDEFKELLDVVSNFSKKYTLAEGNLEKIKELYAQNNGEDLKELASSFINLLTFTAIGAPATFKFFDKNIDRKRYTSTTEILNATLIHQSITGLYETRIDLSKLGGD

SEQ ID NO: 137 - protein, 1345 aa, Streptococcus mutans
MKKPYSIGLDIGTNSVGWAVVTDDYKVPAKKMKVLGNTDKSHIKKNLLGALLFDSGNTAEDRRLKRTARRRYTRRRNRILYLQEIFSEEMGKVDDSFFHRLDESFLTDDDKNFDSHPIFGNKAEEDAYHQKFPTIYHLRKHLADSTEKADLRLVYLALAHMIKFRGHFLIEGELNAENTDVQKLFADFVGVYDRTFDDSHLSEITVDASSILTEKISKSRRLEKLINNYPKEKKNTLFGNLIALSLGLQPNFKTNFKLSEDAKLQFSKDTYEEELEVLLAQIGDNYAELFLSAKKLYDSILLSGILTVTDVSTKAPLSASMIQRYNEHQMDLAQLKQFIRQKLSDKYNEVFSDVSKDGYAGYIDGKTNQEAFYKYLKGLLNKIEGSGYFLDKIEREDFLRKQRTFDNGSIPHQIHLQEMRAIIRRQAEFYPFLADNQDRIEKILTFRIPYYVGPLARGKSDFAWLSRKSADKITPWNFDEIVDKESSVEAFINRMTNYDLYLPNQKVLPKHSLLYEKFTVYNELTKVKYKTEQGKTAFFDANMKQEIFDGVFKVYRKVTKDKLMDFLEKEFDEFRIVDLTGLDKENKAFNASYGTYHDLRKILDKDFLDNSKNEKILEDIVLTLTLFEDREMIRKRLKNYSDLLTKEQLKKLERRHYTGWGRLSAELIHGIRNKESRKTILDYLIDDGNSNRNFMQLINDDALSFKEEIAKAQVIGETDNLNQVVSDIAGSPAIKKGILQSLKIVDELVKIMGHQPENIVVEMARENQFTNQGRRNSQQRLKGLTDSIKEFGSQILKEHPVENSQLQNDRLFLYYLQNGRDMYTGEELDIDYLSQYDIDHIIPQAFIKDNSIDNRVLTSSKENRGKSDDVPSKDVVRKMKSYWSKLLSAKLITQRKFDNLTKGERGGLTDDDKAGFIKRQLVETRQITKHVARILDERFNTETDENNKKIRQVKIVTLKSNLVSNFRKEFELYKVREINDYHHAHDAYLNAVIGKALLGVYPQLEPEFVYGDYPHFHGHKENKATAKKFFYSNIMNFFKKDDVRTDKNGEIIWKKDEYISNIKKVLSYPQVNIVKKVEEQTGGFSKESILPKGDSDKLIPRKTKKFYWDTKKYGGFDSPIVAYSILVIADIEKGKSKKLKTVKALVGVTIMEKMTFERDPVAFLERKGYRNVQEENIIKLPKYSLFKLENGRKRLLASARELQKGNEIVLPNHLGTLLYHAKNIHKVDEPKHLDYVDKHKDEFKELLDVVSNFSKKYTLAEGNLEKIKELYAQNNGEDLKELASSFINLLTFTAIGAPATFKFFDKNIDRKRYTSTTEILNATLIHQSITGLYETRIDLSKLGGD

SEQ ID NO: 138 - protein, 1345 aa, Streptococcus mutans
MKKPYSIGLDIGTNSVGWAVVTDDYKVPAKKMKVLGNTDKSHIKKNLLGALLFDSGNTAADRRLKRTARRRYTRRRNRILYLQEIFAEEMSKVDDSFFHRLEDSFLVTEDKRGERHPIFGNLEEEVKYHENFPTIYHLRQYLADNPEKVDLRLVYLALAHIIKFRGHFLIEGKFDTRNNDVQRLFQEFLAVYDNTFENSSLQEQNVQVEEILTDKISKSAKKDRVLKLFPNEKSNGRFAEFLKLIVGNQADFKKHFELEEKAPLQFSKDTYEEELEVLLAQIGDNYAELFLSAKKLYDSILLSGILTVTDVSTKAPLSASMIQRYNEHQMDLAQLKQFIRQKLSDKYNEVFSDVSKDGYAGYIDGKTNQEAFYKYLKGLLNKIEGSGYFLDKIEREDFLRKQRTFDNGSIPHQIHLQEMRAIIRRQAEFYPFLADNQDRIEKILTFRIPYYVGPLARGKSDFAWLSRKSADKITPWNFDEIVDKESSAEAFINRMTNYDLYLPNQKVLPKHSLLYEKFTVYNELTKVKYKTEQGKTAFFDANMKQEIFDGVFKVYRKVTKDKLMDFLEKEFDEFRIVDLTGLDKENKVFNASYGTYHDLCKILDKDFLDNSKNEKILEDIVLTLTLFEDREMIRKRLENYSDLLTKEQVKKLERRHYTGWGRLSAELIHGIRNKESRKTILDYLIDDGNSNRNFMQLINDDALSFKEEIAKAQVIGETDNLNQVVSDIAGSPAIKKGILQSLKIVDELVKIMGHQPENIVVEMARENQFTKQGRRNSQQRLKGLTDSIKEFGSQILKEHPVENSQLQNDRLFLYYLQNGRDMYTGEELDIDYLSQYDIDHIIPQAFIKDNSIDNRVLTSSKENRGKSDDVPSKDVVRKMKSYWSKLLSAKLITQRKFDNLTKAERGGLTDDDKAGFIKRQLVETRQITKHVARILDERFYTETDENNKKIRQVKIVTLKSNLVSNFRKEFELYKVREINDYHHAHDAYLNAVIGKALLGVYPQLEPEFVYGDYPHFHGHKENKATAKKFFYSNIMNFFKKDDVRTDKNGEIIWKKDEHISNIKKVLSYPQVNIVKKVEEQTGGFSKESILPKGNSDKLIPRKTKKFYWDTKKYGGFDSPIVAYSILVIADIEKGKSKKLKTVKALVGVTIMEKMTFERDPVAFLERKGYRNVQEENIIKLPKYSLFKLENGRKRLLASARELQKGNEIVLPNHLGTLLYHAKNIHKVDEPKHLDYVDKHKDEFKELLDVVSNFSKKYTLAEGNLEKIKELYAQNNGEDLKELASSFINLLTFTAIGAPATFKFFDKNIDRKRYTSTTEILNATLIHQSITGLYETRIDLSKLGGD

SEQ ID NO: 139 - protein, 1345 aa, Streptococcus mutans
MKKPYSIGLDIGTNSVGWAVVTDDYKVPAKKMKVLGNTDKSHIKKNLLGALLFDSGNTAADRRLKRTARRRYTRRRNRILYLQEIFAEEMSKVDDSFFHRLEDSFLVTEDKRGERHPIFGNLEEEVKYHENFPTIYHLRQYLADNPEKVDLRLVYLALAHIIKFRGHFLIEGKFDTRNNDVQRLFQEFLAVYDNTFENSSLQEQNVQVEEILTDKISKSAKKDRVLKLFPNEKSNGRFAEFLKLIVGNQADFKKHFELEEKAPLQFSKDTYEEELEVLLAQIGDNYAELFLSAKKLYDSILLSGILTVTDVSTKAPLSASMIQRYNEHQMDLAQLKQFIRQKLSDKYNEVFSDVSKDGYAGYIDGKTNQEAFYKYLKGLLNKIEGSGYFLDKIEREDFLRKQRTFDNGSIPHQIHLQEMRAIIRRQAEFYPFLADNQDRIEKILTFRIPYYVGPLARGKSDFAWLSRKSADKITPWNFDEIVDKESSAEAFINRMTNYDLYLPNQKVLPKHSLLYEKFTVYNELTKVKYKTEQGKTAFFDANMKQEIFDGVFKVYRKVTKDKLMDFLEKEFDEFRIVDLTGLDKENKAFNASYGTYHDLRKILDKDFLDNSKNEKILEDIVLTLTLFEDREMIRKRLENYSDLLTKEQVKKLERRHYTGWGRLSAELIHGIRNKESRKTILDYLIDDGNSNRNFMQLINDDALSFKEEIAKAQVIGETDNLNQVVSDIAGSPAIKKGILQSLKIVDELVKIMGHQPENIVVEMARENQFTNQGRRNSQQRLKGLTDSIKEFGSQILKEHPVENSQLQNDRLFLYYLQNGRDMYTGEELDIDYLSQYDIDHIIPQAFIKDNSIDNRVLTSSKENRGKSDDVPSKNVVRKMKSYWSKLLSAKLITQRKFDNLTKAERGGLTDDDKAGFIKRQLVETRQITKHVARILDERFHTETDENNKKIRQVKIVTLKSNLVSNFRKEFELYKVREINDYHHAHDAYLNAVIGKALLGVYPQLEPEFVYGDYPHFHGHKENKATAKKFFYSNIMNFFKKDDVRTDKNGEIIWKKDEHISNIKKVLSYPQVNIVKKVEEQTGGFSKESILPKGNSDKLIPRKTKKFYWDTKKYGGFDSPIVAYSILVIADIEKGKSKKLKTVKALVGVTIMEKMTFERDPVAFLERKGYRNVQEENIIKLPKYSLFKLENGRKRLLASARELQKGNEIVLPNHLGTLLYHAKNIHKVDEPKHLDYVDKHKDEFKELLDVVSNFSKKYTLAEGNLEKIKELYAQNNGEDLKELSSSFINLLTFTAIGAPAAFKFFDKNIDRKRYTSTTEILNATLIHQSITGLYETRIDLSKLGGD

SEQ ID NO: 140 - protein, 1355 aa, Streptococcus mutans
MKKPYSIGLDIGTNSVGWAVVTDDYKVPAKKMKVLGNTDKSHIKKNLLGALLFDSGNTAEDRRLKRTARRRYTRRRNRILYLQEIFAEEMSKVDDSFFHRLDESFLTDDDKNFDSHPIFGNKAEEDAYHQKFPTIYHLRKHLADSTEKADLRLVYLALAHMIKFRGHFLIEGELNAENTDVQKLFADFVGVYDRTFDDSHLSEITVDASSILTEKISKSRRLEKLINNYPKEKKNTLFGNLIALSLGLQPNFKTNFKLSEDAKLQFSKDTYEEDLEELLGKIGDDYADLFTLAKNLYDAILLSGILTADDSSTKAPLSASMIKRYAEHHEDLEKLKEFIKANKPELYHDIFKDETKNGYAGYIENGVKQDEFYKYLKNTLSKITGSDYFLDQIEREDFLRKQRTFDNGSIPHQIHLQEMHAILRRQGDYYPFLKENQDRIEKILTFRIPYYVGPLARKNSRFAWAEYHSDEAVTPWNFDQVIDKESSAQAFIEHMTNNDLYLPNEKVLPKHSPLYEKYTVYNELTKIKYVTEIGEAKFFDANLKQEIFDGLFKHERKVTKKKLRTFLDKNFDEFRIVDIQGLDKETETFNASYATYQDLLKVIKDKVFMDNPENAEILENIVLTLTLFEDREMIKQRLAKYADVFDKKVIDQLARRHYTGWGRLSAKLLNGIRDKQSCKTIMDYLIDDAQSNRNLMQLITDDNLTFKDDIVKAQYVDNSDDLHQVVQSLAGSPAIKKGILQSLKIVDELVKVMGKEPEQIVVEMARENQTTAKGRRNSQQRYKRLKEAIKSLDRDLNHKILKEHPTDNQALQNNRLFLYYLQNGRDMYTGESLDINRLSDYDIDHVIPQAFIKDNSIDNRVLTSSKANRGKSDDVPSEDVVNRMRPFWNKLLSSGLISQRKYNNLTKKELTLDDKAGFIKRQLVETRQITKHVARMLDERFNKEFDDNNKRIRRVKIVTLKSNLVSSFRKEFELYKVREINDYHHAHDAYLNAVVVKALLVKYPKLEPEFVYGEYPKYNSYRERKTATQKMFFYSNIMNMFKSKVKLADDQIVERPMIEVNDETGEIAWDKTKHITTVKKVLSYPQVNIVKKVEEQTIGQNGGLFDDNPKSPLEVIPSKLVPLKKALNPEKYGGYQKPTTAYPILLIVDTKQLIPISVMDKKRFEQNPVKFLKDKGYQQIEKNNFVKLPKYTLVDIGNGIKRLWASSKEVHKGNQLVVSKKSQDLLYHAHHLDNDYSNEYVKNHYQQFDILFNEITSFSKKCKLGKEHIQKIEEAYSKERDFASIEELADGFIKLLGFTQLGATSPFSFLGIKLNQKQYTGKKDYLLPCMEATLIHQSITGLYETRIDLSKLGGD

SEQ ID NO: 141 - protein, 1345 aa, Streptococcus mutans
MKKPYSIGLDIGTNSVGWSVVTDDYKVPAKKMKVLGNTDKSHIEKNLLGALLFDSGNTAEDRRLKRTARRRYTRRRNRILYLQEIFSEEMGKVDDSFFHRLEDSFLVTEDKRGERHPIFGNLEEEVKYHENFPTIYHLRQYLADNPEKVDLRLVYLALAHIIKFRGHFLIEGKFDTRNNDVQRLFQEFLAVYDNTFENSSLQEQNVQVEEILTDKISKSAKKDRVLKLFPNEKSNGRFAEFLKLIVGNQADFKKHFELEEKAPLQFSKDTYEEELEVLLAQIGDNYAELFLSAKKLYDSILLSGILTVTDVGTKAPLSASMIQRYNEHQMDLAQLKQFIRQKLSDKYNEVFSDVSKDGYAGYIDGKTNQEAFYKYLKGLLNKIEGSGYFLDKIEREDFLRKQRTFDNGSIPHQIHLQEMRAIIRRQAEFYPFLADNQDRIEKLLTFRIPYYVGPLARGKSDFAWLSRKSADKITPWNFDEIVDKESSAEAFINRMTNYDLYLPNQKVLPKHSLLYEKFTVYNELTKVKYKTEQGKTAFFDANMKQEIFDGVFKVYRKVTKDKLMDFLEKEFDEFRIVDLTGLDKENKVFNASYGTYHDLCKILDKDFLDNSKNEKILEDIVLTLTLFEDREMIRKRLENYSDLLTKEQVKKLERRHYTGWGRLSAELIHGIRNKESRKTILDYLIDDGNSNRNFMQLINDDALSFKEEIAKAQVIGETDNLNQVVSDIAGSPAIKKGILQSLKIVDELVKIMGHQPENIVVEMARENQFTNQGRRNSQQRLKGLTDSIKEFGSQILKEHPVENSQLQNDRLFLYYLQNGRDMYTGEELDIDYLSQYDIDHIIPQAFIKDNSIDNRVLTSSKENRGKSDDVPSKDVVRKMKSYWSKLLSAKLITQRKFDNLTKAERGGLTDDDKAGFIKRQLVETRQITKHVARILDERFNTETDENNKKIRQVKIVTLKSNLVSNFRKEFELYKVREINDYHHAHDAYLNAVIGKALLGVYPQLEPEFVYGDYPHFHGHKENKATAKKFFYSNIMNFFKKDDVRIDKNGEIIWKKDEHISNIKKVLSYPQVNIVKKVEEQTGGFSKESILPKGNSDKLIPRKTKKFYWDTKKYGGFDSPIVAYSILVIADIEKGKSKKLKTVKALVGVTIMEKMTFERDPVAFLERKGYRNVQEENIIKLPKYSLFKLENGRKRLLASARELQKGNEIVLPNHLGTLLYHAKNIHKVDEPKHLDYVDKHKDEFKELLDVVSNFSKKYTLAEGNLEKIKELYAQNNGEDLKELASSFINLLTFTAIGAPATFKFFDKNIDRKRYTSTTEILNATLIHQSITGLYETRIDLSKLGGD

SEQ ID NO: 142 - protein, 1345 aa, Streptococcus mutans
MKKPYSIGLDIGTNSVGWAVVTDDYKVPAKKMKVLGNTDKSHIKKNLLGALLFDSGNTAEDRRLKRTARRRYTRRRNRILYLQEIFSEEMGKVDDSFFHRLEDSFLVTEDKRGERHPIFGNLEEEVKYHENFPTIYHLRQYLADNPEKTDLRLVYLALAHIIKFRGHFLIEGKFDTRNNDVQRLFQEFLAVYDNTFENSSLQEQNVQVEEILTDKISKSAKKDRVLKLFPNEKSNGRFAEFLKLIVGNQADFKKHFELEEKAPLQFSKDIYEEELEVLLAQIGDNYAELFLSAKKLYDSILLSGILTVTDVSTKAPLSASMIQRYNEHQMDLAQLKQFIRQKLSDKYNEVFSDVSKDGYAGYIDGKTNQEAFYKYLKGLLNKIEGSGYFLDKIEREDFLRKQRTFDNGSIPHQIHLQEMRAIIRRQAEFYPFLADNQDRIEKILTFRIPYYVGPLARGKSDFAWLSRKSADKITPWNFDEIVDKESSVEAFINRMTNYDLYLPNQKVLPKHSLLYEKFTVYNELTKVKYKTEQGKTAFFDANMKQEIFDGVFKVYRKVTKDKLMDFLEKEFDEFRIVDLTGLDKENKAFNASYGTYHDLRKILDKDFLDNSKNEKILEDIVLTLTLFEDREMIRKRLKNYSDLLTKEQLKKLERRHYTGWGRLSAELIHGIRNKESRKTILDYLIDDGNSNRNFMQLINDDALSFKEEIAKAQVIGETDNLNQVVSDIAGSPAIKKGILQSLKIVDELVKIMGHQPENIVVEMARENQFTNQGRRNSQQRLKGLTDSIKEFGSQILKEHPVENSQLQNDRLFLYYLQNGRDMYTGEELDIDYLSQYDIDHIIPQAFIKDNSIDNRVLTSSKENRGKSDDVPSKNVVRKMKSYWSKLLSAKLITQRKFDNLTKAERGGLTDDDKAGFIKRQLVETRQITKHVARILDERFHTETDENNKKIRQVKIVTLKSNLVSNFRKEFELYKVREINDYHHAHDAYLNAVIGKALLGVYPQLEPEFVYGDYPHFHGHKENKATAKKFFYSNIMNFFKKDDVRTDKNGEIIWKKDEHISNIKKVLSYPQVNIVKKVEEQTGGFSKESILPKGNSDKLIPRKTKKFYWDTKKYGGFDSPIVAYSILVIADIEKGKSKKLKTVKALVGVTIMEKMTFERDPVAFLERKGYRNVQEENIIKLPKYSLFKLENGRKRLLASARELQKGNEIVLPNHLGTLLYHAKNIHKVDEPKHLDYVDKHKDEFKELLDVVSNFSKKYTLAEGNLEKIKELYAQNNGEDLKELASSFINLLTFTAIGAPATFKFFDKNIDRKRYTSTTEILNATLIHQSITGLYETRIDLSKLGGD

SEQ ID NO: 143 - protein, 1345 aa, Streptococcus mutans
MKKPYSIGLDIGTNSVGWAVVTDDYKVSAKKMKVLGNTDKSHIKKNLLGALLFDSGNTAEDRRLKRTARRRYTRRRNRILYLQEIFAEEMSKVDDSFFHRLEDSFLVTEDKRGERHPIFGNLEEEVKYHENFPTIYHLRQYLADNPEKVDLRLVYLALAHIIKFRGHFLIEGKFDTRNNDVQRLFQEFLAVYDNTFENSSLQEQNVQVEEILTDKISKSAKKDRVLKLFPNEKSNGRFAEFLKLIVGNQADFKKHFELEEKAPLQFSKDTYEEELEVLLAQIGDNYAELFLSAKKLYDSILLSGILTVTDVSTKAPLSASMIQRYNEHQMDLAQLKQFIRQKLSDKYNEVFSDVSKDGYAGYIDGKTNQEAFYKYLKGLLNKIEGSGYFLDKIEREDFLRKQRTFDNGSIPHQIHLQEMRAIIRRQAEFYPFLADNQDRIEKILTFRIPYYVGPLARGKSDFAWLSRKSADKITPWNFDEIVDKESSAEAFINRMTNYDLYLPNQKVLPKHSLLYEKFTVYNELTKVKYKTEQGKTAFFDANMKQEIFDGVFKVYRKVTKDKLMDFLEKEFDEFRIVDLTGLDKENKAFNASYGTYHDLRKILDKDFLDNSKNEKILEDIVLTLTLFEDREMIRKRLENYSDLLTKEQVKKLERRHYTGWGRLSAELIHGIRNKESRKTILDYLIDDGNSNRNFMQLINDDALSFKEEIAKAQVIGETDNLNQVVSDIAGSPAIKKGILQSLKIVDELVKIMGHQPENIVVEMARENQFTNQGRRNSQQRLKGLTDSIKEFGSQILKEHPVEHSQLQNDRLFLYYLQNGRDMYTGEELDIDYLSQYDIDHIIPQAFIKDNSIDNRVLTSSKENRGKSDDVPSKNVVRKMKSYWSKLLSAKLITQRKFDNLTKAERGGLTDDDKAGFIKRQLVETRQITKHVARILDERFHTETDENNKKIRQVKIVTLKSNLVSNFRKEFELYKVREINDYHHTHDAYLNAVIGKALLGVYPQLEPEFVYGDYPHFHGHKENKATAKKFFYSNIMNFFKKDDVRTDKNGEIIWKKDEHISNIKKVLSYPQVNIVKKVEEQTGGFSKESILPKGNSDKLIPRKTKKFYWDTKKYGGFDSPIVAYSILVIADIEKGKSKKLKTVKALVGVTIMEKMTFERDPVAFLERKGYRNVQEENIIKLPKYSLFKLENGRKRLLASARELQKGNEIVLPNHLGTLLYHAKNIHKVDEPKHLDYVDKHKDEFKELLDVVSNFSKKYTLAEGNLEKIKELYAQNNGEDLKELASSFINLLTFTAIGAPATFKFFDKNIDRKRYTSTTEILNATLIHQSITGLYETRIDLSKLGGD

SEQ ID NO: 144 - protein, 1345 aa, Streptococcus mutans
MKKPYSIGLDIGTNSVGWAVVTDDYKVPAKKMKVLGNTDKSHIKKNLLGALLFDSGNTAEDRRLKRTARRRYTRRRNRILYLQEIFSEEMGKVDDSFFHRLEDSFLVTEDKRGERHPIFGNLEEEVKYHENFPTIYHLRQYLADNPEKTDLRLVYLALAHIIKFRGHFLIEGKFDTRNNDVQRLFQEFLAVYDNTFENSSLQEQNVQVEEILTDKISKSAKKDRVLKLFPNEKSNGRFAEFLKLIVGNQADFKKHFELEEKAPLQFSKDIYEEELEVLLAQIGDNYAELFLSAKKLYDSILLSGILTVTDVSTKAPLSASMIQRYNEHQMDLAQLKQFIRQKLSDKYNEVFSDVSKDGYAGYIDGKTNQEAFYKYLKGLLNKIEGSGYFLDKIEREDFLRKQRTFDNGSIPHQIHLQEMRAIIRRQAEFYPFLADNQDRIEKILTFRIPYYVGPLARGKSDFAWLSRKSADKITPWNFDEIVDKESSVEAFINRMTNYDLYLPNQKVLPKHSLLYEKFTVYNELTKVKYKTEQGKTAFFDANMKQEIFDGVFKVYRKVTKDKLMDFLEKEFDEFRIVDLTGLDKENKAFNASYGTYHDLRKILDKDFLDNSKNEKILEDIVLTLTLFEDREMIRKRLKNYSDLLTKEQLKKLERRHYTGWGRLSAELIHGIRNKESRKTILDYLIDDGNSNRNFMQLINDDALSFKEEIAKAQVIGETDNLNQVVSDIAGSPAIKKGILQSLKIVDELVKIMGHQPENIVVEMARENQFTNQGRRNSQQRLKGLTDSIKEFGSQILKEHPVENSQLQNDRLFLYYLQNGRDMYTGEELDIDYLSQYDIDHIIPQAFIKDNSIDNRVLTSSKENRGKSDDVPSKDVVRKMKSYWSKLLSAKLITQRKFDNLTKAERGGLTDDDKAGFIKRQLVETRQITKHVARILDERFNTETDENNKKIRQVKIVTLKSNLVSNFRKEFELYKVREINDYHHAHDAYLNAVIGKALLGVYPQLEPEFVYGDYPHFHGHKENKATAKKFFYSNIMNFFKKDDVRTDKNGEIIWKKDEHISNIKKVLSYPQVNIVKKVEEQTGGFSKESILPKGNSYKLIPRKTKKFYWDTKKYGGFDSPIVAYSILVIADIEKGKSKKLKTVKALVGVTIMEKMTFERDPVAFLERKGYRNVQEENIIKLPKYSLFKLENGRKRLLASARELQKGNEIVLPNHLGTLLYHAKNIHKVDEPKHLDYVDKHKDEFKELLDVVSNFSKKYTLAEGNLEKIKELYAQNNGEDLKELASSFINLLTFTAIGAPAAFKFFDKNIDRKRYTSTTEILNATLIHQSITGLYETRIDLSKLGGD

SEQ ID NO: 145 - protein, 1345 aa, Streptococcus mutans
MKKPYSIGLDIGTNSVGWAVVTDDYKVPAKKMKVLGNTDKSHIKKNLLGALLFDSGNTAEDRRLKRTTRRRYTRRRNRILYLQEIFSEEMGKVDDSFFHRLEDSFLVTEDKRGERHPIFGNLEEEVKYHENFPTIYHLRQYLADNPEKTDLRLVYLALAHIIKFRGHFLIEGKFDTRNNDVQRLFQEFLAVYDNTFENSSLQEQNVQVEEILTDKISKSAKKDRVLKLFPNEKSNGCFAEFLKLIVGNQADFKKHFELEEKAPLQFSKDTYEEELEVLLAQIGDNYAELFLSAKKLYDSILLSGILTVTDVSTKAPLSASMIQRYNEHQMDLTQLKQFIRQKLSDKYNEVFSDVSKDGYAGYIDGKTNQEAFYKYLKGLLNKIEGSGYFLDKIEREDFLRKQRTFDNGSIPHQIHLQEMRAIIRRQAEFYPFLADNQDRIEKLLTFRIPYYVGPLASGKSDFAWLSRKSADKITPWNFDEIVDKESSAEAFINRMTNYDLYLPNQKVLPKHSLLYEKFTVYNELTKVKYKTEQGKTAFFDANMKQEIFDGVFKVYRKVTKDKLMDFLEKEFDEFRIVDLTGLDKENKVFNASYGTYHDLCKILDKDFLDNSKNEKILEDIVLTLTLFEDREMIRKRLENYSDLLTKEQVKKLERRHYTGWGRLSAELIHGIRNKESRKTILDYLIDDGNSNRNFMQLINDDALSFKEEIAKAQVIGETDNLNQVVSDIAGSPAIKKGILQSLKIVDELVKIMGHQPENIVVEMARENQFTNQGRRNSQQRLKGLTDSIKEFGSQILKEHPVENSQLQNDRLFLYYLQNGRDMYTGEELDIDYLSQYDIDHIIPQAFIKDNSIDNRVLTSSKENRGKSDDVPSKDVVRKMKSYWSKLLSAKLITQRKFDNLTKAERGGLTDDDKAGFIKRQLVETRQITKHVARILDERFNTETDENNKKIRQVKIVTLKSNLVSNFRKEFELYKVREINDYHHAHDAYLNAVIGKALLGVYPQLEPEFVYGDYPHFHGHKENKATAKKFFYSNIMNFFKKDDVRTDKNGEIIWKKDEHISNIKKVLSYPQVNIVKKVEEQTGGFSKESILPKGNSDKLIPRKTKKFYWDTKKYGGFDSPIVAYSILVIADIEKGKSKKLKTVKALVGVTIMEKMTFERDPVAFLERKGYRNVQEENIIKLPKYSLFKLENGRKRLLASARELQKGNEIVLPNHLGTLLYHAKNIHKVDEPKHLDYVDKHKDEFKELLDVVSNFSKKYTLAEGNLEKIKELYAQNNGEDLKELASSFINLLTFTAIGAPATFKFFDKNIDRKRYTSTTEILNATLIHQSITGLYETRIDLSKLGGD

SEQ ID NO: 146 - protein, 1345 aa, Streptococcus mutans
MKKPYSIGLDIGTNSVGWAVVTDDYKVPAKKMKVLGNTDKSHIKKNLLGALLFDSGNTAEDRRLKRTARRRYTRRRNRILYLQEIFSEEMGKVDDSFFHRLEDSFLVTEDKRGERHPIFGNLEEEVKYHENFPTIYHLRQYLADNPEKTDLRLVYLALAHIIKFRGHFLIEGKFDTRNNDVQRLFQEFLAVYDNTFENSSLQEQNVQVEEILTDKISKSAKKDRVLKLFPNEKSNGRFAEFLKLIVGNQADFKKHFELEEKAPLQFSKDIYEEELEVLLAQIGDNYAELFLSAKKLYDSILLSGILTVTDVSTKAPLSASMIQRYNEHQMDLAQLKQFIRQKLSDKYNEVFSDVSKDGYAGYIDGKTNQEAFYKYLKGLLNKIEGSGYFLDKIEREDFLRKQRTFDNGSIPHQIHLQEMRAIIRRQAEFYPFLADNQDRIEKILTFRIPYYVGPLARGKSDFAWLSRKSADKITPWNFDEIVDKESSAEAFINRMTNYDLYLPNQKVLPKHSLLYEKFTVYNELTKVKYKTEQGKTAFFDANMKQEIFDGVFKVYRKVTKDKLMDFLEKEFDEFRIVDLTGLDKENKAFNASYGTYHDLRKILDKDFLDNSKNEKILEDIVLTLTLFEDREMIRKRLKNYSDLLTKEQLKKLERRHYTGWGRLSAELIHGIRNKESRKTILDYLIDDGNSNRNFMQLINDDALSFKEEIAKAQVIGETDNLNQVVSDIAGSLAIKKGILQSLKIVDELVKIMGHQPENIVVEMARENQFTNQGRRNSQQRLKGLTDSIKEFGSQILKEHPVENSQLQNDRLFLYYLQNGRDMYTGEELDIDYLSQYDIDHIIPQAFIKDNSIDNRVLTSSKENRGKSDDVPSKDVVRKMKSYWSKLLSAKLITQRKFDNLTKGERGGLTDDDKAGFIKRQLVETRQITKHVARILDERFNTETDENNKKIRQVKIVTLKSNLVSNFRKEFELYKVREINDYHHAHDAYLNAVIGKALLGVYPQLEPEFVYGDYPHFHGHKENKATAKKFFYSNIMNFFKKDDVRTDKNGEIIWKKDEYISNIKKVLSYPQVNIVKKVEEQTGGFFKESILPKGDSDKLIPRKTKKFYWDTKKYGGFDSPIVAYSILVIADIEKGKSKKLKTVKALVGVTIMEKMTFERDPVAFLERKGYRNVQEENIIKLPKYSLFKLENGRKRLLASARELQKGNEIVLPNHLGTLLYHAKNIHKVDEPKHLDYVDKHKDEFKELLDVVSNFSKKYTLAEGNLEKIKELYAQNNGEDLKELASSFINLLTFTAIGAPATFKFFDKNIDRKRYTSTTEILNATLIHQSITGLYETRIDLSKLGGD

SEQ ID NO: 147 - protein, 1345 aa, Streptococcus mutans
MKKPYSIGLDIGTNSVGWAVVTDDYKVPAKKMKVLGNTDKSHIKKNLLGALLFDSGNTAEDRRLKRTARRRYTRRRNRILYLQEIFSEEMGKVNDSFFHRLEDSFLVTEDKRGERHPIFGNLEEEVKYHENFPTIYHLRQYLADNPEKVDLRLVYLALAHIIKFRGHFLIEGKFDTRNNDVQRLFQEFLAVYDNTFENSSLQEQNVQVEEILTDKISKSAKKDRVLKLFPNEKSNGRFAEFLKLIVGNQADFKKHFELEEKAPLQFSKDTYEEELEVLLAQIGDNYAELFLSAKKLYDSILLSGILTVTDVSTKAPLSASMIQRYNEHQMDLAQLKQFIRQKLSDKYNEVFSDVSKDGYAGYIDGKTNQEAFYKYLKGLLNKIEGSGYFLDKIEREDFLRKQRTFDNGSIPHQIHLQEMRAIIRRQAEFYPFLADNQDRIEKILTFRIPYYVGPLARGKSDFAWLSRKSADKITPWNFDEIVDKESSAEAFINRMTNYDLYLPNQKVLPKHSLLYEKFTVYNELTKVKYKTEQGKTAFFDANMKQEIFDGVFKVYRKVTKDKLMDFLEKEFDEFRIVDLTGLDKENKVFNASYGTYHDLCKILDKDFLDNSKNEKILEDIVLTLTLFEDREMIRKRLENYSDLLTKEQVKKLERRHYTGWGRLSAELIHGIRNKESRKTILDYLIDDGNSNRNFMQLINDDALSFKEEIAKAQVIGETDNLNQVVSDIAGSPAIKKGILQSLKIVDELVKIMGHQPENIVVEMARENQFTKQGRRNSQQRLKGLTDSIKEFGSQILKEHPVENSQLQNDRLFLYYLQNGRDMYTGEELDIDYLSQYDIDHIIPQAFIKDNSIDNRVLTSSKENRGKSDDVPSKDVVRKMKSYWSKLLSAKLITQRKFDNLTKAERGGLTDDDKAGFIKRQLVETRQITKHVARILDERFYTETDENNKKIRQVKIVTLKSNLVSNFRKEFELYKVREINDYHHAHDAYLNAVIGKALLGVYPQLEPEFVYGDYPHFHGHKENKATAKKFFYSNIMNFFKKDDVRTDKNGEIIWKKDEYISNIKKVLSYPQVNIVKKVEEQTGGFSKESILPKGNSDKLIPRKTKKFYWDTKKYGGFDSPIVAYSILVIADIEKGKSKKLKTVKALVGVTIMEKMTFERDPIAFLERKGYRNVQEENIIKLPKYSLFKLENGRKRLLASARELQKGNEIVLPNHLGTLLYHAKNIHKVDEPKHLDYVDKHKDEFKELLDVVSNFSKKYTLAEGNLEKIKELYAQNNGEDLKELASSFINLLTFTAIGAPAAFKFFDKNIDRKRYTSTTEILNATLIHQSITGLYETRIDLSKLGGD

SEQ ID NO: 148 - protein, 1345 aa, Streptococcus mutans
MKKPYSIGLDIGTNSVGWAVVTDDYKVPAKKMKVLGNTDKSHIKKNLLGALLFDSGNTAEDRRLKRTARRRYTRRRNRILYLQEIFSEEMGKVDDSFFHRLEDSFLVTEDKRGERHPIFGNLEEEVKYHENFPTIYHLRQYLADNPEKTDLRLVYLALAHIIKFGGHFLIEGKFDTRNNDVQRLFQEFLAVYDNTFENSSLQEQNVQVEEILTDKISKSAKKDRVLKLFPNEKSNGRFAEFLKLIVGNQADFKKHFELEEKAPLQFSKDIYEEELEVLLAQIGDNYAELFLSAKKLYDSILLSGILTVTDVSTKAPLSASMIQRYNEHQMDLAQLKQFIRQKLSDKYNEVFSDVSKDGYAGYIDGKTNQEAFYKYLKGLLNKIEGSGYFLDKIEREDFLRKQRTFDNGSIPHQIHLQEMRAIIRRQAEFYPFLADNQDRIEKILTFRIPYYVGPLARGKSDFAWLSRKSADKITPWNFDEIVDKESSVEAFINRMTNYDLYLPNQKVLPKHSLLYEKFTVYNELTKVKYKTEQGKTAFFDANMKQEIFDGVFKVYRKVTKDKLMDFLEKEFDEFRIVDLTGLDKENKAFNASYGTYHDLRKILDKDFLDNSKNEKILEDIVLTLTLFEDREMIRKRLKNYSDLLTKEQLKKLERRHYTGWGRLSAELIHGIRNKESRKTILDYLIDDGNSNRNFMQLINDDALSFKEEIAKAQVIGETDNLNQVVSDIAGSPAIKKGILQSLKIVDELVKIMGHQPENIVVEMARENQFTNQGRRNSQQRLKGLTDSIKEFGSQILKEHPVENSQLQNDRLFLYYLQNGRDMYTGEELDIDYLSQYDIDHIIPQAFIKDNSIDNRVLTSSKENRGKSDDVPSKNVVRKMKSYWSKLLSAKLITQRKFDNLTKAERGGLTDDDKAGFIKRQLVETRQITKHVARILDERFHTETDENNKKIRQVKIVTLKSNLVSNFRKEFELYKVREINDYHHAHDAYLNAVIGKALLGVYPQLEPEFVYGDYPHFHGHKENKATAKKFFYSNIMNFFKKDDVRTDKNGEIIWKKDEHISNIKKVLSYPQVNIVKKVEEQTGGFSKESILPKGNSDKLIPRKTKKFYWDTKKYGGFDSPIVAYSILVIADIEKGKSKKLKTVKALVGVTIMEKMTFERDPVAFLERKGYRNVQEENIIKLPKYSLFKLENGRKRLLASARELQKGNEIVLPNHLGTLLYHAKNIHKVDEPKHLDYVDKHKDEFKELLDVVSNFSKKYTLAEGNLEKIKELYAQNNGEDLKELASSFINLLTFTAIGAPATFKFFDKNIDRKRYTSTTEILNATLIHQSITGLYETRIDLSKLGGD

SEQ ID NO: 149 - protein, 1359 aa, Streptococcus mutans
MKKPYSIGLDIGTNSVGWAVVTDDYKVPAKKMKVLGNTDKSHIKKNLLGALLFDSGNTAEDRRLKRTARRRYTRRRNRILYLQEIFAEEMMQVDESFFQRLDDSFLVEEDKRGSRYPIFGTLKEEKKYHKEFKTIYHLREKLANSTEKADLRLVYLSLAHMIKFRGHFLIEGQLKAENTNVQALFKDFVEVYDKTVEESHLSEMTVDALSILTEKVSKSRRLENLVECYPTEKKNTLFGNLIALSLGLQPNFKTNFQLSEDAKLQFSKDTYEEDLEGLLGEIGDEYADLFASAKNLYDAILLSGILAVDDNTTKAPLSASMVKRYKEHKEELAAFKRFIKEKLPKKYEEIFKDDTKNGYAGYVGADKKLRKRSGKLATEEEFYKYVKGILNKVEGADVWLDKIDREDFLRKQRTFDNGSIPHQIHLQEMHAILRRQGEHYPFLKENQDKIEKILTFRIPYYVGPLVRKGSRFAWAEYKADEKITPWNFDDILDKEKSAEKFITRMTLNDLYLPEEKVLPKHSLLYETFTVYNELTKVKYVNEQGEAKFFDANMKQEIFDHVFKENRKVTKDKLLNYLNKEFEEFRIVNLTGLDKENKVFNSSLGTYHDLRKILNKSFLDNKENEQIIEDIIQTLTLFEDREMIRQRLQKYSDIFTKAQLKKLERRHYTGWGRLSYKLINGIRDKQSNKTILGYLIDDGYSNRNFMQLINDDALSFKEEIAKAQVIGEMDGLNQVVSDIAGSPAIKKGILQSLKIVDELVKVMGHNPANIVIEMARENQTTAKGRRSSQKRYKRLEEAIKNLDHDLNHKILKEHPTDNQALQNDRLFLYYLQNGRDMYTEDPLDINRLSDYDIDHIIPQAFIKDNSIDNRVLTRSDKNRGKSDDVPSEEVVHKMKPFWSKLLSAKLITQRKFDNLTKAERGGLTDDDKAGFIKRQLVETRQITKHVARILDERFNTETDENNKKIRQVKIVTLKSNLVSNFRKEFELYKVREINDYHHAHDAYLNAVIGKALLGVYPQLEPEFVYGDYPHFHGHKENKATAKKFFYSNIMNFFKKGDVRTDKNGEIIWKKDEHISNIKKVLSYPQVNIVKKVEEQTGGFSKESILPKGNSDKLIPRKTKKFYWDTKKYGGFDSPIVAYSILVIADIEKGKSKKLKTVKALVGVTIMEKMTFERDPVAFLERKGYRNVQEENIIKLPKYSLFKLENGRKRLLASARELQKGNEIVLPNHLETLLYHAKNIHKVDEPKHLDYVDKHKDEFKELLDVVSNFSKKYTLAEGNLEKIKELYAQNNGEDLKELASSFINLLTFTAIGAPAAFKFFDKNIDRKRYTSTTEILNATLIHQSITGLYETRIDLNKLGGD

SEQ ID NO: 150 - protein, 1345 aa, Streptococcus mutans
MKKPYSIGLDIGTNSVGWAVVTDDYKVPAKKMKVLGNTDKSHIKKNLLGALLFDSGNTAEDRRLKRTARRRYTRRRNRILYLQEIFSEEMDKVDDSFFHRLEDSFLVTEDKRGERHPIFGNLEEEVKYHENFPTIYHLRQYLADNPEKVDLRLVYLALAHIIKFRGHFLIEGKFDTRNNDVQRLFQEFLAVYDNTFENSSLQEQNVQVEEILTDKISKSAKKDRVLKLFPNEKSNGRFAEFLKLIVGNQADFKKHFELEEKAPLQFSKDTYEEELEVLLAQIGDNYAELFLSAKKLYDSILLSGILTVTDVSTKAPLSASMIQRYNEHQMDLAQLKQFIRQKLSDKYNEVFSDVSKDGYAGYIDGKTNQEAFYKYLKGLLNKIEGSGYFLDKIEREDFLRKQRTFDNGSIPHQIHLQEMRAIIRRQAEFYPFLADNQDRIEKILTFRIPYYVGPLARGKSDFAWLSRKSADKITPWNFDEIVDKESSAEAFINRMTNYDLYLPNQKVLPKHSLLYEKFTVYNELTKVKYKTEQGKTAFFDANMKQEIFDGVFKVYRKVTKDKLMDFLEKEFDEFRIVDLTGLDKENKVFNASYGTYHDLCKILDKDFLDNSKNEKILEDIVLTLTLFEDREMIRKRLENYSDLLTKEQVKKLERRHYTGWGRLSAELIHGIRNKESRKTILDYLIDDGNSNRNFMQLINDDALSFKEEIAKAQVIGETDNLNQVVSDIAGSPAIKKGILQSLKIVDELVKIMGHQPENIVVEMARENQFTKQGRRNSQQRLKGLTDSIKEFGSQILKEHPVENSQLQNDRLFLYYLQNGRDMYTGEELDIDYLSQYDIDHIIPQAFIKDNSIDNRVLTSSKENRGKSDDVPSKDVVRKMKSYWSKLLSAKLITQRKFDNLTKAERGGLTDDDKAGFIKRQLVETRQITKHVARILDERFYTETDENNKKIRQVKIVTLKSNLVSNFRKEFELYKVREINDYHHAHDAYLNAVIGKALLGVYPQLEPEFVYGDYPHFHGHKENKATAKKFFYSNIMNFFKKDDVRTDKNGEIIWKKDEHISNIKKVLSYPQVNIVKKVEEQTGGFSKESILPKGNSDKLIPRKTKKFYWDTKKYGGFDSPIVAYSILVIADIEKGKSKKLKTVKALVGVTIMEKMTFERDPVAFLERKGYRNVQEENIIKLPKYSLFKLENGRKRLLASARELQKGNEIVLPNHLGTLLYHAKNIHKVDEPKHLDYVDKHKDEFKELLDVVSNFSKKYTLAEGNLEKIKELYAQNNGEDLKELASSFINLLTFTAIGAPATFKFFDKNIDRKRYTSTTEILNATLIHQSITGLYETRIDLSKLGGD

SEQ ID NO: 151 - protein, 1345 aa, Streptococcus mutans
MKKPYSIGLDIGTNSVGWAVVTDDYKVPAKKMKVLGNTDKSHIKKNLLGALLFDSGNTAEDRRLKRTARRRYTRRRNRILYLQEIFSEEMGKVDDSFFHRLEDSFLVTEDKRGERHPIFGNLEEEVKYHENFPTIYHLRQYLADNPEKVDLRLVYLALAHIIKFRGHFLIEGKFDTRNNDVQKLFQEFLAVYDNTFENSSLQEQNVQVEEILTDKISKSAKKDRVLKLFPNEKSNGRFAEFLKLIVGNQADFKKHFELEEKAPLQLSKDTYEEELEVLLAQIGDNYAELFLSAKKLYDSILLSGILTVTDVSTKAPLSASMIQRYNEHQMDLAQLKQFIRQKLSDKYNEVFSDVSKDGYAGYIDGKTNQEAFYKYLKGLLNKIEGSGYFLDKIEREDFLRKQRTFDNGSIPHQIHLQEMRAIIRRQAEFYPFLADNQDRIEKILTFRIPYYVGPLARGKSDFAWLSRKSADKITPWNFDEIVDKESSVEAFINRMTNYDLYLPNQKVLPKHSLLYEKFTVYNELTKVKYKTEQGKTAFFDANMKQEIFDGVFKVYRKVTKDKLMDFLEKEFDEFRIVDLTGLDKENKAFNASYGTYHDLRKILDKDFLDNSKNEKILEDIVLTLTLFEDREMIRKRLENYSDLLTKEQVKKLERRHYTGWGRLSAELIHGIRNKESRKTLLDYLIDDGNSNRNFMQLINDDALSFKEEIAKAQVIGETDNLNQVVSDIAGSPAIKKGILQSLKIVDELVKIMGHQPENIVVEMARENQFTNQGRRNSQQRLKGLTDSIKEFGSQILKEHPVENSQLQNDRLFLYYLQNGRDMYTGEELDIDYLSQYDIDHIIPQAFIKDNSIDNRVLTSSKENRGKSDDVPSKDVVRKMKSYWSKLLSAKLITQRKFDNLTKAERGGLTDDDKAGFIKRQLVETRQITKHVARILDERFNTETDENNKKIRQVKIVTLKSNLVSNFRKEFELYKVREINDYHHAHDAYLNAVIGKALLGVYPQLEPEFVYGDYPHFHGHKENKATAKKFFYSNIMNFFKKDDVRTDKNGEIIWKKDEYISNIKKVLSYPQVNIVKKVEEQTGGFSKESILPKGNSDKLIPRKTKKFYWDTKKYGGFDSPIVAYSILVIADIEKGKSKKLKTVKALVGVTIMEKMTFERDPIAFLERKGYRNVQEENIIKLPKYSLFKLENGRKRLLASARELQKGNEIVLPNHLGTLLYHAKNIHKVDEPKHLDYVDKHKDEFKELLDVVSNFSKKYTLAEGNLEKIKELYAQNNGEDLKELASSFINLLTFTAIGAPATFKFFDKNIDRKRYTSTTEILNATLIHQSITGLYETRIDLSKLGGD

SEQ ID NO: 152 - protein, 1345 aa, Streptococcus mutans
MKKPYSIGLDIGTNSVGWAVVTDDYKVPAKKMKVLGNTDKSHIKKNLLGALLFDSGNTAEDRRLKRTARRRYTRRRNRILYLQEIFSEEMGKVDDSFFHRLEDSFLVTEDKRGERHPIFGNLEEEVKYHENFPTIYHLRQYLADNPEKTDLRLVYLALAHIIKFRGHFLIEGKFDTRNNDVQRLFQEFLAVYDNTFENSSLQEQNVQVEEILTDKISKSAKKDRVLKLFPNEKSNGRFAEFLKLIVGNQADFKKHFELEEKAPLQFSKDIYEEELEVLLAQIGDNYAELFLSAKKLYDSILLSGILTVTDVSTKAPLSASMIQRYNEHQMDLAQLKQFIRQKLSDKYNEVFSDVSKDGYAGYIDGKTNQEAFYKYLKGLLNKIEGSGYFLDKIEREDFLRKQRTFDNGSIPHQIHLQEMRAIIRRQAEFYPFLADNQDRIEKILTFRIPYYVGPLARGKSDFAWLSRKSADKITPWNFDEIVDKESSAEAFINRMTNYDLYLPNQKVLPKHSLLYEKFTVYNELTKVKYKTEQGKTAFFDANMKQEIFDGVFKVYRKVTKDKLMDFLEKEFDEFRIVDLTGLDKENKAFNASYGTYHDLRKILDKDFLDNSKNEKILEDIVLTLTLFEDREMIRKRLKNYSDLLTKEQLKKLERRHYTGWGRLSAELIHGIRNKESRKTILDYLIDDGNSNRNFMQLINDDALSFKEEIAKAQVIGETDNLNQVVSDIAGSLAIKKGILQSLKIVDELVKIMGHQPENIVVEMARENQFTNQGRRNSQQRLKGLTDSIKEFGSQILKEHPVENSQLQNDRLFLYYLQNGRDMYTGEELDIDYLSQYDIDHIIPQAFIKDNSIDNRVLTSSKENRGKSDDVPSKDVVRKMKSYWSKLLSAKLITQRKFDNLTKGERGGLTDDDKAGFIKHQLVETRQITKHVARILDERFNTETDENNKKIRQVKIVTLKSNLVSNFRKEFELYKVREINDYHHAHDAYLNAVIGKALLGVYPQLEPEFVYGDYPHFHGHKENKATAKKFFYSNIMNFFKKDDVRTDKNGEIIWKKDEYISNIKKVLSYPQVNIVKKVEEQTGGFFKESILPKGDSDKLIPRKTKKFYWDTKKYGGFDSPIVAYSILVIADIEKGKSKKLKTVKALVGVTIMEKMTFERDPVAFLERKGYRNVQEENIIKLPKYSLFKLENGRKRLLASARELQKGNEIVLPNHLGTLLYHAKNIHKVDEPKHLDYVDKHKDEFKELLDVVSNFSKKYTLAEGNLEKIKELYAQNNGEDLKELASSFINLLTFTAIGAPATFKFFDKNIDRKRYTSTTEILNATLIHQSITGLYETRIDLSKLGGD

SEQ ID NO: 153 - protein, 1345 aa, Streptococcus mutans
MKKPYSIGLDIGTNSVGWAVVTDDYKVPAKKMKVLGNTDKSHIKKNLLGALLFDSGNTAEDRRLKRTARRRYTRRRNRILYLQEIFSEEMGKVDDSFFHRLEDSFLVTEDKRGERHPIFGNLEEEVKYHENFPTIYHLRQYLADNPEKTDLRLVYLALAHIIKFRGHFLIEGKFDTRNNDVQRLFQEFLAVYDNTFENSSLQEQNVQVEEILTDKISKSAKKDRVLKLFPNEKSNGRFAEFLKLIVGNQADFKKHFELEEKAPLQFSKDIYEEELEVLLAQIGDNYAELFLSAKKLYDSILLSGILTVTDVSTKAPLSASMIQRYNEHQMDLAQLKQFIRQKLSDKYNEVFSDVSKDGYAGYIDGKTNQEAFYKYLKGLLNKIEGSGYFLDKIEREDFLRKQRTFDNGSIPHQIHLQEMRAIIRRQAEFYPFLADNQDRIEKILTFRIPYYVGPLARGKSDFAWLSRKSADKITPWNFDEIVDKESSAEAFINRMTNYDLYLPNQKVLPKHSLLYEKFTVYNELTKVKYKTEQGKTAFFDANMKQEIFDGVFKVYRKVTKDKLMDFLEKEFDEFRIVDLTGLDKENKAFNASYGTYHDLRKILDKDFLDNSKNEKILEDIVLTLTLFEDREMIRKRLENYSDLLTKEQVKKLERRHYTGWGRLSAELIHGIRNKESRKTLLDYLIDDGNSNRNFMQLINDDALSFKEEIAKAQVIGETDNLNQVVSDIAGSPAIKKGILQSLKIVDELVKIMGHQPENIVVEMARENQFTNQGQRNSQQRLKGLTDSIKEFGSQILKEHPVENSQLQNDRLFLYYLQNGRDMYTGEELDIDYLSQYDIDHIIPQAFIKDNSIDNRVLTSSKENRGKSDDVPSKDVVRKMKSYWSKLLSAKLITQRKFDNLTKAERGGLTDDDKAGFIKRQLVETRQITKHVARILDERFNTETDENNKKIRQVKIVTLKSNLVSNFRKEFELYKVREINDYHHAHDAYLNAVIGKALLGVYPQLEPEFVYGDYPHFHGHKENKATAKKFFYSNIMNFFKKDDVRTDKNGEIIWKKDEYISNIKKVLSYPQVNIVKKVEEQTGGFSKESILPKGDSDKLIPRKTKKFYWDTKKYGGFDSPIVAYSILVIADIEKGKSKKLKTVKALVGVTIMEKMTFERDPVAFLERKGYRNVQEENIIKLPKYSLFKLENGRKRLLASARELQKGNEIVLPDHLGTLLYHAKNIHKVDEPKHLDYVDKHKDEFKELLDVVSNFSKKYTLAEGNLEKIKELYAQNNGEDLKELASSFINLLTFTAIGAPATFKFFDKNIDRKRYTSTTEILNATLIHQSITGLYETRIDLSKLGGD

SEQ ID NO: 154 - protein, 1345 aa, Streptococcus mutans
MKKPYSIGLDIGTNSVGWAVVTDDYKVPAKKMKVLGNTDKSHIKKNLLGALLFDSGNTAADRRLKRTARRRYTRRRNRILYLQEIFAEEMSKVDDSFFHRLEDSFLVTEDKRGERHPIFGNLEEEVKYHENFPTIYHLRQYLADNPEKVDLRLVYLALAHIIKFRGHFLIEGKFDTRNNDVQRLFQEFLAVYDNTFENSSLQEQNVQVEEILTDKISKSAKKDRVLKLFPNEKSNGRFAEFLKLIVGNQADFKKHFELEEKAPLQFSKDTYEEELEVLLAQIGDNYAELFLSAKKLYDSILLSGILTVTDVSTKAPLSASMIQRYNEHQMDLAQLKQFIRQKLSDKYNEVFSDVSKDGYAGYIDGKTNQEAFYKYLKGLLNKIEGSGYFLDKIEREDFLRKQRTFDNGSIPHQIHLQEMRAIIRRQAEFYPFLADNQDRIEKILTFRIPYYVGPLARGKSDFAWLSRKSADKITPWNFDEIVDKESSAEAFINRMTNYDLYLPNQKVLPKHSLLYEKFTVYNELTKVKYKTEQGKTAFFDANMKQEIFDGVFKVYRKVTKDKLMDFLEKEFDEFRIVDLTGLDKENKAFNASYGTYHDLRKILDKDFLDNSKNEKILEDIVLTLTLFEDREMIRKRLENYSDLLTKEQVKKLERRHYTGWGRLSAELIHGIRNKESRKTILDYLIDDGNSNRNFMQLINDDALSFKEEIAKAQVIGETDNLNQVVSDIAGSPAIKKGILQSLKIVDELVKIMGHQPENIVVEMARENQFTNQGRRNSQQRLKGLTDSIKEFGSQILKEHPVKHSQLQNDRLFLYYLQNGRDMYTGEELDIDYLSQYDIDHIIPQAFIKDNSIDNRVLTSSKENRGKSDDVPSKNVVRKMKSYWSKLLSAKLITQRKFDNLTKAERGGLTDDDKAGFIKRQLVETRQITKHVARILDERFHTETDENNKKIRQVKIVTLKSNLVSNFRKEFELYKVREINDYHHAHDAYLNAVIGKALLGVYPQLEPEFVYGDYPHFHGHKENKATAKKFFYSNIMNFFKKDDVRTDKNGEIIWKKDEHISNIKKVLSYPQVNIVKKVEEQTGGFSKESILPKGNSDKLIPRKTKKFYWDTKKYGGFDSPIVAYSILVIADIEKGKSKKLKTVKALVGVTIMEKMTFERDPVAFLERKGYRNVQEENIIKLPKYSLFKLENGRKRLLASARELQKGNEIVLPNHLGTLLYHAKNIHKVDEPKHLDYVDKHKDEFKELLDVVSNFSKKYTLAEGNLEKIKELYAQNNGEDLKELASSFINLLTFTAIGAPATFKFFDKNIDRKRYTSTTEILNATLIHQSITGLYETRIDLSKLGGD

SEQ ID NO: 155 - protein, 1345 aa, Streptococcus mutans
MKKPYSIGLDIGTNSVGWAVVTDDYKVPDKKMKVLGNTDKSHIKKNLLGALLFDSGNTAEDRRLKRTARRRYTRRRNRILYLQEIFSEEMGKVDDSFFHRLEDSFLVTEDKRGERHPIFGNLEEEVKYHENFPTIYHLRQYLADNPEKTDLRLVYLALAHIIKFRGHFLIEGKFDTRNNDVQRLFQEFLAVYDNTFENSSLQEQNVQVEEILTDKISKSAKKDRVLKLFPNEKSNGRFAEFLKLIVGNQADFKKHFELEEKAPLQFSKDIYEEELEVLLAQIGDNYAELFLSAKKLYDSILLSGILTVTDVSTKAPLSASMIQRYNEHQMDLAQLKQFIRQKLSDKYNEVFSDVSKDGYAGYIDGKTNQEAFYKYLKGLLNKIEGSGYFLDKIEREDFLRKQRTFDNGSIPHQIHLQEMRAIIRRQAEFYPFLADNQDRIEKILTFRIPYYVGPLARGKSDFAWLSRKSADKITPWNFDEIVDKESSVEAFINRMTNYDLYLPNQKVLPKHSLLYEKFTVYNELTKVKYKTEQGKTAFFDANMKQEIFDGVFKVYRKVTKDKLMDFLEKEFDEFRIVDLTGLDKENKAFNASYGTYHDLRKILDKDFLDNSKNEKILEDIVLTLTLFEDREMIRKRLKNYSDLLTKEQLKKLERRHYTGWGRLSAELIHGIRNKESRKTILDYLIDDGNSNRNFMQLINDDALSFKEEIAKAQVIGETDNLNQVVSDIAGSPAIKKGILQSLKIVDELVKIMGHQPENIVVEMARENQFTNQGRRNSQQRLKGLTDSIKEFGSQILKEHPVENSQLQNDRLFLYYLQNGRDMYTGEELDIDYLSQYDIDHIIPQAFIKDNSIDNRVLTSSKENRGKSDDVPSKDVVRKMKSYWSKLLSAKLITQRKFDNLTKAERGGLTDDDKAGFIKRQLVETRQITKHVARILDERFYTETDENNKKIRQVKIVTLKSNLVSNFRKEFELYKVREINDYHHAHDAYLNAVIGKALLGVYPQLEPEFVYGDYPHFHGHKENKATAKKFFYSNIMNFFKKDDVRTDKNGEIIWKKDEHISNIKKVLSYPQVNIVKKVEEQTGGFSKESILPKGNSDKLIPRKTKKFYWDTKKYGGFDSPIVAYSILVIADIEKGKSKKLKTVKALVGVTIMEKMTFERDPVAFLERKGYRNVQEENIIKLPKYSLFKLENGRKRLLASARELQKGNEIVLPNHLGTLLYHAKNIHKVDEPKHLDYVDKHKDEFKELLDVVSNFSKKYTLAEGNLEKIKELYAQNNGEDLKELASSFINLLTFTAIGAPATFKFFDKNIDRKRYTSTTEILNATLIHQSITGLYETRIDLSKLGGD

SEQ ID NO: 156 - protein, 1345 aa, Streptococcus mutans
MKKPYSIGLDIGTNSVGWAVVTDDYKVPAKKMKVLGNTDKSHIKKNLLGALLFDSGNTAADRRLKRTARRRYTRRRNRILYLQEIFAEEMSKVDDSFFHRLEDSFLVTEDKRGERHPIFGNLEEEVKYHENFPTIYHLRQYLADNPEKVDLRLVYLALAHIIKFRGHFLIEGKFDTRNNDVQRLFQEFLAVYDNTFENSSLQEQNVQVEEILTDKISKSAKKDRVLKLFPNEKSNGRFAEFLKLIVGNQADFKKHFELEEKAPLQFSKDTYEEELEVLLAQIGDNYAELFLSAKKLYDSILLSGILTVTDVSTKAPLSASMIQRYNEHQMDLAQLKQFIRQKLSDKYNEVFSDVSKDGYAGYIDGKTNQEAFYKYLKGLLNKIEGSGYFLDKIEREDFLRKQRTFDNGSIPHQIHLQEMRAIIRRQAEFYPFLADNQDRIEKILTFRIPYYVGPLARGKSDFAWLSRKSADKITPWNFDEIVDKESSAEAFINRMTNYDLYLPNQKVLPKHSLLYEKFTVYNELTKVKYKTEQGKTAFFDANMKQEIFDGVFKVYRKVTKDKLMDFLEKEFDEFRIVDLTGLDKENKAFNASYGTYHDLRKILDKDFLDNSKNEKILEDIVLTLTLFEDREMIRKRLENYSDLLTKEQVKKLERRHYTGWGRLSAELIHGIRNKESRKTILDYLIDDGNSNRNFMQLINDDALSFKEEIAKAQVIGETDNLNQVVSDIAGSPAIKKGILQSLKIVDELVKIMGHQPENIVVEMARENQFTNQGRRNSQQRLKGLTDSIKEFGSQILKEHPVENSQLQNDRLFLYYLQNGRDMYTGEELDIDYLSQYDIDHIIPQAFIKDNSIDNRVLTSSKENRGKSDDVPSKNVVRKMKSYWSKLLSAKLITQRKFDNLTKAERGGLTDDDKAGFIKRQLVETRQITKHVARILDERFHTETDENNKKIRQVKIVTLKSNLVSNFRKEFELYKVREINDYHHAHDAYLNAVIGKALLGVYPQLEPEFVYGDYPHFHGHKENKATAKKFFYSNIMNFFKKDDVRTDKNGEIIWKKDEHISNIKKVLSYPQVNIVKKVEEQTGGFSKESILPKGNSDKLIPRKTKKFYWDTKKYGGFDSPIVAYSILVIADIEKGKSKKLKTVKALVGVTIMEKMTFERDPVAFLERKGYRNVQEENIIKLPKYSLFKLENGRKRLLASARELQKGNEIVLPNHLGTLLYHAKNIHKVDEPKHLDYVDKHKDEFKELLDVVSNFSKKYTLAEGNLEKIKELYAQNNGEDLKELASSFINLLTFTAIGAPATFKFFDKNIDRKRYTSTTEILNATLIHQSITGLYETRIDLSKLGGD

SEQ ID NO: 157 - protein, 1345 aa, Streptococcus mutans
MKKPYSIGLDIGTNSVGWAVVTDDYKVPAKKMKVLGNTDKSHIEKNLLGALLFDSGNTAEDRRLKRTARRRYTRRRNRILYLQEIFSEEMGKVDDSFFHRLEDSFLVTEDKRGERHPIFGNLEEEVKYHENFPTIYHLRQYLADNPEKVDLRLVYLALAHIIKFRGHFLIEGKFDTRNNDVQRLFQEFLAVYDNTFENSSLQEQNVQVEEILTDKISKSAKKDRVLKLFPNEKSNGRFAEFLKLIIGNQADFKKHFELEEKAPLQFSKDTYEEELEVLLAQIGDNYAELFLSAKKLYDSILLSGILTVTDVGTQAPLSASMIQRYNEHQMDLAQLKQFIRQKLSDKYNEVFSDVSKDGYAGYIDGKTNQEAFYKYLKGLLNKIEGSGYFLDKIEREDFLRKQRTFDNGSIPHQIHLQEMRAIIRRQAEFYPFLADNQDRIEKLLTFRIPYYVGPLARGKSDFAWLSRKSADKITPWNFDEIVDKESSAEAFINRMTNYDLYLPNQKVLPKHSLLYEKFTVYNELTKVKYKTEQGKTAFFDANMKQEIFDGVFKVYRKVTKDKLMDFLEKEFDEFRIVDLTGLDKENKVFNASYGTYHDLCKILDKDFLDNSKNEKILEDIVLTLTLFEDREMIRKRLENYSDLLTKEQVKKLERRHYTGWGRLSAELIHGIRNKESRKTILDYLIDDGNSNRNFMQLINDDALSFKEEIAKAQVIGETDNLNQVVSDIAGSPAIKKGILQSLKIVDELVKIMGHQPENIVVEMARENQFTNQGRRNSQQRLKGLTDSIKEFGSQILKEHPVENSQLQNDRLFLYYLQNGRDMYTGEELDIDYLSQYDIDHIIPQAFIKDNSIDNRVLTSSKENRGKSDDVPSKDVVRKMKSYWSKLLSAKLITQRKFDNLTKAERGGLTDDDKAGFIKRQLVETRQITKHVARILDERFHTETDENNKKIRQVKIVTLKSNLVSNFRKEFELYKVREINDYHHAHDAYLNAVIGKALLGVYPQLEPEFVYGDYPHFHGHKENKATAKKFFYSNIMNFFKKDDVRTDKNGEIIWKKDEHISNIKKVLSYPQVNIVKKVEEQTGGFSKESILPKGNSDKLIPRKTKKFYWDTKKYGGFDSPIVAYSILVIADIEKGKSKKLKTVKALVGVTIMEKMTFERDPVAFLERKGYRNVQEENIIKLPKYSLFKLENGRKRLLASARELQKGNEIVLPNHLGTLLYHAKNIHKVDEPKHLDYVDKHKDEFKELLDVVSNFSKKYTLAEGNLEKIKELYAQNNGEDLKELASSFINLLTFTAIGAPATFKFFDKNIDRKRYTSTTEILNATLIHQSITGLYETRIDLNKLGGD

SEQ ID NO: 158 - protein, 1345 aa, Streptococcus mutans
MKKPYSIGLDIGTNSVGWAVVTDDYKVPAKKMKVLGNTDKSHIKKNLLGALLFDSGNTAEDRRLKRTARRRYTRRRNRILYLQEIFSEEMGKVDDSFFHRLEDSFLVTEDKRGERHPIFGNLEEEVKYHENFPTIYHLRQYLADNPEKVDLRLVYLALAHIIKFRGHFLIEGKFDTRNNDVQKLFQEFLAVYDNTFENSSLQEQNVQVEEILTDKISKSAKKDRVLKLFPNEKSNGRFAEFLKLIVGNQADFKKHFELEEKAPLQLSKDTYEEELEVLLAQIGDNYAELFLSAKKLYDSILLSGILTVTDVSTKAPLSASMIQRYNEHQMDLAQLKQFIRQKLSDKYNEVFSDVSKDGYAGYIDGKTNQEAFYKYLKGLLNKIEGSGYFLDKIEREDFLRKQRTFDNGSIPHQIHLQEMRAIIRRQAEFYPFLADNQDRIEKILTFRIPYYVGPLARGKSDFAWLSRKSADKITPWNFDEIVDKESSVEAFINRMTNYDLYLPNQKVLPKHSLLYEKFTVYNELTKVKYKTEQGKTAFFDANMKQEIFDGVFKVYRKVTKDKLMDFLEKEFDEFRIVDLTGLDKENKAFNASYGTYHDLRKILDKDFLDNSKNEKILEDIVLTLTLFEDREMIRKRLENYSDLLTKEQVKKLERRHYTGWGRLSAELIHGIRNKESRKTLLDYLIDDGNSNRNFMQLINDDALSFKEEIAKAQVIGETDNLNQVVSDIAGSPAIKKGILQSLKIVDELVKIMGHQPENIVVEMARENQFTNQGRRNSQQRLKGLTDSIKEFGSQILKEHPVENSQLQNDRLFLYYLQNGRDMYTGEELDIDYLSQYDIDHIIPQAFIKDNSIDNRVLTSSKENRGKSDDVPSKDVVRKMKSYWSKLLSAKLITQRKFDNLTKAERGGLTDDDKAGFIKRQLVETRQITKHVARILDERFNTETDENNKKIRQVKIVTLKSNLVSNFRKEFELYKVREINDYHHAHDAYLNAVIGKALLGVYPQLEPEFVYGDYPHFHGHKENKATAKKFFYSNIMNFFKKDDVRTDKNGEIIWKKDEYISNIKKVLSYPQVNIVKKVEEQTGGFSKESILPKGNSDKLIPRKTKKFYWDTKKYGGFDSPIVAYSILVIADIEKGKSKKLKTVKALVGVTIMEKMTFERDPIAFLERKGYRNVQEENIIKLPKYSLFKLENGRKRLLASARELQKGNEIVLPNHLGTLLYHAKNIHKVDEPKHLDYVDKHKDEFKELLDVVSNFSKKYTLAEGNLEKIKELYAQNNGEDLKELASSFINLLTFTAIGAPAAFKFFDKNIDRKRYTSTTEILNATLIHQSITGLYETRIDLSKLGGD

SEQ ID NO: 159 - protein, 1345 aa, Streptococcus mutans
MKKPYSIGLDIGTNSVGWAVVTDDYKVPAKKMKVLGNTDKSHIKKNLLGALLFDSGNTAEDRRLKRTARRRYTRRRNRILYLQEIFSEEMGKVDDSFFHRLEDSFLVTEDKRGECHPIFGNLEEEVKYHENFPTIYHLRQYLADNPEKTDLRLVYLALAHIIKFRGHFLIEGKFDTRNNDVQRLFQEFLAVYDNTFENSSLQEQNVQVEEILTDKISKSAKKDRVLKLFPNEKSNGRFAEFLKLIVGNQADFKKHFELEEKAPLQFSKDTYEEELEVLLAQIGDNYAELFLSAKKLYDSILLSGILTVTDVSTKAPLSASMIQRYNEHQMDLTQLKQFIRQKLSDKYNEVFSDVSKDGYAGYIDGKTNQEAFYKYLKGLLNKIEGNGYFLDKIEREDFLRKQRTFDNGSIPHQIHLQEMRAIIRRQAEFYPFLADNQDRIEKILTFRIPYYVGPLARGKSDFAWLSRKSADKITPWNFDEIVDKESSAEAFINRMTNYDLYLPNQKVLPKHSLLYEKFTVYNELTKVKYKTEQGKTAFFDANMKQEIFDGVFKVYRKVTKDKLMDFLEKEFDEFRIVDLTGLDKENKAFNASYGTYHDLRKILDKDFLDNSKNEKILEDIVLTLTLFEDREMIRKRLENYSDLLTKEQVKKLERRHYTGWGRLSAELIHGIRNKESRKTLLDYLIDDGNSNRNFMQLINDDALSFKEEIAKAQVIGETDNLNQVVSDIAGSPAIKKGILQSLKIVDELVKIMGHQPENIVVEMARENQFTNQGRRNSQQRLKGLTDSIKEFGSQILKEHPVENSQLQNDRLFLYYLQNGRDMYTGEELDIDYLSQYDIDHIIPQAFIKDNSIDNRVLTSSKENRGKSDDVPSKDVVRKMKPYWSKLLSAKLITQRKFDNLTKAERGGLTDDDKAGFIKRQLVETRQITKHVARILDERFNTETDENNKKIRQVKIVTLKSNLVSNFRKEFELYKVREINDYHHAHDAYLNAVIGKALLGVYPQLEPEFVYGDYPHFHGHEENKATAKKFFYSNIMNFFKKDDVRTDKNGEIIWKKDEHISNIKKVLSYPQVNIVKKVEEQTGGFSKESILPKGNSDKLIPRKTKKFYWDTKKYGGFDSPIVAYSILVIADIEKGKSKKLKTVKALVGVTIMEKMTFERDPVAFLERKGYRNVQEENIIKLPKYSLFKLENGRKRLLASARELQKGNEIVLPNHLGTLLYHAKNIHKVDEPKHLDYVDKHKDEFKELLDVVSNFSKKYTLAEGNLEKIKELYAQNNGEDLKELSSSFINLLTFTAIGAPAAFKFFDKNIDRKRYTSTTEILNATLIHQSITGLYETRIDLSKLGGD

SEQ ID NO: 160 - protein, 1345 aa, Streptococcus mutans
MKKPYSIGLDIGTNSVGWAVVTDDYKVPAKKMKVLGNTDKSHIEKNLLGALLFDSGNTAEDRRLKRTARRRYTRRRNRILYLQEIFSEEMGKVDDSFFHRLEDSFLVTEDKRGERHPIFGNLEEEVKYHENFPTIYHLRQYLADNPEKVDLRLVYLALAHIIKFRGHFLIEGKFDTRNNDVQRLFQEFLAVYDNTFENSSLQEQNVQVEEILTDKISKSAKKDRVLKLFPNEKSNGRFAEFLKLIVGNQADFKKHFELEEKVPLQFSKDTYEEELEVLLAQIGDNYAELFLSAKKLYDSILLSGILTVTDVGTKAPLSASMIQRYNEHQMDLAQLKQFIRQKLSDKYNEVFSDVSKDGYAGYIDGKTNQEAFYKYLKGLLNKIEGSGYFLDKIEREDFLRKQRTFDNGSIPHQIHLQEMRAIIRRQAEFYPFLADNQDRIEKLLTFRIPYYVGPLARGKSDFAWLSRKSADKITPWNFDEIVDKESSAEAFINRMTNYDLYLPNQKVLPKHSLLYEKFTVYNELTKVKYKTEQGKTAFFDANMKQEIFDGVFKVYRKVTKDKLMDFLEKEFDEFRIVDLTGLDKENKVFNASYGTYHDLCKILDKDFLDNSKNEKILEDIVLTLTLFEDREMIRKRLENYSDLLTKEQVKKLERRHYTGWGRLSAELIHGIRNKESRKTILDYLIDDGNSNRNFMQLINDDALSFKEEIAKAQVIGETDNLNQVVSDIAGSPAIKKGILQSLKIVDELVKIMGHQPENIVVEMARENQFTNQGRRNSQQRLKGLTDSIKEFGSQILKEHPVENSQLQNDRLFLYYLQNGRDMYTGEELDIDYLSQYDIDHIIPQAFIKDNSIDNRVLTSSKENRGKSDDVPSKDVVRKMKSYWSKLLSAKLITQRKFDNLTKAERGGLTDDDKAGFIKRQLVETRQITKHVARILDERFNTETDENNKKIRQVKIVTLKSNLVSNFRKEFELYKVREINDYHHAHDAYLNAVIGKALLGVYPQLEPEFVYGDYPHFHGHKENKATAKKFFYSNIMNFFKKDDVRTDKNGEIIWKKDEHISNIKKVLSYPQVNIVKKVEEQTGGFSKESILPKGNSDKLIPRKTKKFYWDTKKYGGFDSPIVAYSILVIADIEKGKSKKLKTVKALVGVTIMEKMTFERDPVAFLERKGYRNVQEENIIKLPKYSLFKLENGRKRLLASARELQKGNEIVLPNHLGTLLYHAKNIHKVDEPKHLDYVDKHKDEFKELLDVVSNFSKKYTLAEGNLEKIKELYAQNNGEDLKELASSFINLLTFTAIGAPATFKFFDKNIDRKRYTSTTEILNATLIHQSITGLYETRIDLNKLGGD

SEQ ID NO: 161 - protein, 1345 aa, Streptococcus mutans
MKKPYSIGLDIGTNSVGWAVVTDDYKVPAKKMKVLGNTDKSHIKKNLLGALLFDSGNTAEDRRLKRTARRRYTRRRNRILYLQEIFSEEMGKVDDSFFHRLEDSFLVTEDKRGERHPIFGNLEEEVKYHENFPTIYHLRQYLADNPEKTDLRLVYLALAHIIKFRGHFLIEGKFDTRNNDVQRLFQEFLAVYDNTFENSSLQEQNVQVEEILTDKISKSAKKDRVLKLFPNEKSNGRFAEFLKLIVGNQADFKKHFELEEKAPLQFSKDIYEEELEVLLAQIGDNYAELFLSAKKLYDSILLSGILTVTDVSTKAPLSASMIQRYNEHQMDLAQLKQFIRQKLSDKYNEVFSDVSKDGYAGYIDGKTNQEAFYKYLKGLLNKIEGSGYFLDKIEREDFLRKQRTFDNGSIPHQIHLQEMRAIIRRQAEFYPFLADNQDRIEKILTFRIPYYVGPLARGKSDFAWLSRKSADKITPWNFDEIVDKESSAEAFINRMTNYDLYLPNQKVLPKHSLLYEKFTVYNELTKVKYKTEQGKTAFFDANMKQEIFDGVFKVYRKVTKDKLMDFLEKEFDEFRIVDLTGLDKENKAFNASYGTYHDLRKILDKDFLDNSKNEKILEDIVLTLTLFEDREMIRKRLKNYSDLLTKEQLKKLERRHYTGWGRLSAELIHGIRNKESRKTILDYLIDDGNSNRNFMQLINDDALSFKEEIAKAQVIGETDNLNQVVSDIAGSLAIKKGILQNLKIVDELVKIMGHQPENIVVEMARENQFTNQGRRNSQQRLKGLTDSIKEFGSQILKEHPVENSQLQNDRLFLYYLQNGRDMYTGEELDIDYLSQYDIDHIIPQAFIKDNSIDNRVLTSSKENRGKSDDVPSKDVVRKMKSYWSKLLSAKLITQRKFDNLTKGERGGLTDDDKAGFIKRQLVETRQITKHVARILDERFNTETDENNKKIRQVKIVTLKSNLVSNFRKEFELYKVREINDYHHAHDAYLNAVIGKALLGVYPQLEPEFVYGDYPHFHGHKENKATAKKFFYSNIMNFFKKDDVRTDKNGEIIWKKDEYISNIKKVLSYPQVNIVKKVEEQTGGFFKESILPKGDSDKLIPRKTKKFYWDTKKYGGFDSPIVAYSILVIADIEKGKSKKLKTVKALVGVTIMEKMTFERDPVAFLERKGYRNVQEENIIKLPKYSLFKLENGRKRLLASARELQKGNEIVLPNHLGTLLYHAKNIHKVDEPKHLDYVDKHKDEFKELLDVVSNFSKKYTLAEGNLEKIKELYAQNNGEDLKELASSFINLLTFTAIGAPATFKFFDKNIDRKRYTSTTEILNATLIHQSITGLYETRIDLSKLGGD

SEQ ID NO: 162 - protein, 1345 aa, Streptococcus mutans
MKKPYSIGLDIGTNSVGWAVVTDDYKVPAKKMKVLGNTDKSHIEKNLLGALLFDSGNTAEDRRLKRTARRRYTRRRNRILYLQEIFSEEMGKVDDSFFHRLEDSFLVTEDKRGERHPIFGNLEEEVKYHENFPTIYHLRQYLADNPEKVDLRLVYLALAHIIKFRGHFLIEGKFDTRNNDVQRLFQEFLAVYDNTFENSSLQEQNVQVEEILTDKISKSAKKDRVLKLFPNEKSNGRFAEFLKLIVGNQADFKKHFELEEKAPLQFSKDTYEEELEVLLAQIGDNYAELFLSAKKLYDSILLSGILTVTDVGTKAPLSASMIQRYNEHQMDLAQLKQFIRQKLSDKYNEVFSDVSKDGYAGYIDGKTNQEAFYKYLKGLLNKIEGSGYFLDKIEREDFLRKQRTFDNGSIPHQIHLQEMRAIIRRQAEFYPFLADNQDRIEKLLTFRIPYYVGPLARGKSDFAWLSRKSADKITPWNFDEIVDKESSAEAFINRMTNYDLYLPNQKVLPKHSLLYEKFTVYNELTKVKYKTEQGKTAFFDANMKQEIFDGVFKVYRKVTKDKLMDFLEKEFDEFRIVDLTGLDKENKVFNASYGTYHDLCKILDKDFLDNSKNEKILEDIVLTLTLFEDREMIRKRLENYSDLLTKEQVKKLERRHYTGWGRLSAELIHGIRNKESRKTILDYLIDDGNSNRNFMQLINDDALSFKEEIAKAQVIGETDNLNQVVSDIAGSPAIKKGILQSLKIVDELVKIMGHQPENIVVEMARENQFTNQGRRNSQQRLKGLTDSIKEFGSQILKEHPVENSQLQNDRLFLYYLQNGRDMYTGEELDIDYLSQYDIDHIIPQAFIKDNSIDNRVLTSSKENRGKSDDVPSKDVVRKMKSYWSKLLSAKLITQRKFDNLTKAERGGLTDDDKAGFIKRQLVETRQITKHVARILDERFNTETDENNKKIRQVKIVTLKSNLVSNFRKEFELYKVREINDYHHAHDAYLNAVIGKALLGVYPQLEPEFVYGDYPHFHGHKENKATAKKFFYSNIMNFFKKDDVRTDKNGEIIWKKDEHISNIKKVLSYPQVNIVKKVEEQTGGFSKESILPKGNSDKLIPRKTKKFYWDTKKYGGFDSPIVAYSILVIADIEKSKSKKLKTVKALVGVTIMEKMTFERDPVAFLERKGYRNVQEENIIKLPKYSLFKLENGRKRLLASARELQKGNEIVLPNHLGTLLYHAKNIHKVDEPKHLDYVDKHKDEFKELLDVVSNFSKKYTLAEGNLEKIKELYAQNNGEDLKELASSFINLLTFTAIGAPATFKFFDKNIDRKRYTSTTEILNATLIHQSITGLYETRIDLNKLGGD

SEQ ID NO: 163 - protein, 1355 aa, Streptococcus mutans
MKKPYSIGLDIGTNSVGWAVVTDDYKVPAKKMKVLGNTDKSHIKKNLLGALLFDSGNTAEDRRLKRTARRRYTRRRNRILYLQEIFAEEMSKVDDSFFHRLDESFLTDDDKNFDSHPIFGNKAEEDAYHQKFPTIYHLRKHLADSTEKADLRLVYLALAHMIKFRGHFLIEGELNAENTDVQKLFADFVGVYDRTFDDSHLSEITVDASSILTEKISKSRRLEKLINNYPKEKKNTLFGNLIALSLGLQPNFKTNFKLSEDAKLQFSKDTYEEDLEELLGKIGDDYADLFTLAKNLYDAILLSGILTADDSSTKAPLSASMIKRYAEHHEDLEKLKEFIKANKPELYHDIFKDETKNGYAGYIENGVKQDEFYKYLKNTLSKITGSDYFLDQIEREDFLRKQRTFDNGSIPHQIHLQEMHAILRRQGDYYPFLKENQDRIEKILTFRIPYYVGPLARKNSRFAWAEYHSDEAVTPWNFDQVIDKESSAQAFIEHMTNNDLYLPNEKVLPKHSPLYEKYTVYNELTKIKYVTEIGEAKFFDANLKQEIFDGLFKHERKVTKKKLRTFLDKNFDEFRIVDIQGLDKETETFNASYATYQDLLKVIKDKVFMDNPENAEILENIVLTLTLFEDREMIKQRLAKYADVFDKKVIDQLARRHYTGWGRLSAKLLNGIRDKQSCKTIMDYLIDDAQSNRNLMQLITDDNLTFKDDIVKAQYVDNSDDLHQVVQSLAGSPAIKKGILQSLKIVDELVKVMGKEPEQIVVEMARENQTTAKGRRNSQQRYKRLKEAIKSLDRDLNHKILKEHPTDNQALQNNRLFLYYLQNGRDMYTGESLDINRLSDYDIDHVIPQAFIKDNSIDNRVLTSSKANRGKSDDVPSEDVVNRMRPFWNKLLSSGLISQRKYNNLTKKELTLDDKAGFIKRQLVETRQITKHVARMLDERFNKEFDDNNKRIRRVKIVTLKSNLVSSFRKEFELYKVREINDYHHAHDAYLNAVVVKALLVKYPKLEPEFVYGEYLKYNSYRERKTATQKMFFYSNIMNMFKSKVKLADDQIVERPMIEVNDETGEIAWDKTKHITTVKKVLSYPQVNIVKKVEEQTIGQNGGLFDDNPKSPLEVIPSKLVPLKKALNPEKYGGYQKPTTAYPILLIVDTKQLIPISVMDKKRFEQNPVKFLKDKGYQQIEKNNFVKLPKYTLVDIGNGIKRLWASSKEVHKGNQLVVSKKSQDLLYHAHHLDNDYSNEYVKNHYQQFDILFNEITSFSKKCKLGKEHIQKIEEAYSKERDFASIEELADGFIKLLGFTQLGATSPFSFLGIKLNQKQYTGKKDYLLPCMEATLIHQSITGLYETRIDLSKLGGD

SEQ ID NO: 164 - protein, 1345 aa, Streptococcus mutans
MKKPYSIGLDIGTNSVGWAVVTDDYKVPAKKMKVLGNTDKSHIKKNLLGALLFDSGNTAADRRLKRTARRRYTRRRNRILYLQEIFAEEMSKVDDSFFHRLEDSFLVTEDKRGERHPIFGNLEEEVKYHENFPTIYHLRQYLADNPEKVDLRLVYLALAHIIKFRGHFLIEGKFDTRNNDVQRLFQEFLAVYDNTFENSSLQEQNVQVEEILTDKISKSAKKDRVLKLFPNEKSNGRFAEFLKLIVGNQADFKKHFELEEKAPLQFSKDTYEEELEVLLAQIGDNYAELFLSAKKLYDSILLSGILTVTDVSTKAPLSASMIQRYNEHQMDLVQLKQFIRQKLSDKYNEVFSDVSKDGYAGYIDGKTNQEAFYKYLKGLLNKIEGSGYFLDKIEREDFLRKQRTFDNGSIPHQIHLQEMRAIIRRQAEFYPFLADNQDRIEKILTFRIPYYVGPLARGKSDFAWLSRKSADKITPWNFDEIVDKESSAEAFINRMTNYDLYLPNQKVLPKHSLLYEKFTVYNELTKVKYKTEQGKTAFFDANMKQEIFDGVFKVYRKVTKDKLMDFLEKEFDEFRIVDLTGLDKENKAFNASYGTYHDLRKILDKDFLDNSKNEKILEDIVLTLTLFEDREMIRKRLENYSDLLTKEQVKKLERRHYTGWGRLSAELIHGIRNKESRKTILDYLIDDGNSNRNFMQLINDDALSFKEEIAKAQVIGETDNLNQVVSDIAGSPAIKKGILQSLKIVDELVKIMGHQPENIVVEMARENQFTNQGRRNSQQRLKGLTDSIKEFGSQILKEHPVEHSQLQNDRLFLYYLQNGRDMYTGEELDIDYLSQYDIDHIIPQAFIKDNSIDNRVLTSSKENRGKSDDVPSKNVVRKMKSYWSKLLSAKLITQRKFDNLTKAERGGLTDDDKAGFIKRQLVETRQITKHVARILDERFHTETDENNKKIRQVKIVTLKSNLVSNFRKEFELYKVREINDYHHAHDAYLNAVIGKALLGVYPQLEPEFVYGDYPHFHGHKENKATAKKFFYSNIMNFFKKDDVRTDKNGEIIWKKDEHISNIKKVLSYPQVNIVKKVEEQTGGFSKESILPKGNSDKLIPRKTKKFYWDTKKYGGFDSPIVAYSILVIADIEKGKSKKLKTVKALVGVTIMEKMTFERDPVAFLERKGYRNVQEENIIKLPKYSLFKLENGRKRLLASARELQKGNEIVLPNHLGTLLYHAKNIHKVDEPKHLDYVDKHKDEFKELLDVVSNFSKKYTLAEGNLEKIKELYAQNNGEDLKELASSFINLLTFTAIGAPATFKFFDKNIDRKRYTSTTEILNATLIHQSITGLYETRIDLSKLGGD

SEQ ID NO: 165 - protein, 1345 aa, Streptococcus mutans
MKKPYSIGLDIGTNSVGWAVVTDDYKVPAKKMKVLGNTDKSHIKKNLLGALLFDSGNTAEDRRLKRTTRRRYTRRRNRILYLQEIFSEEMGKVDDSFFHRLEDSFLVTEDKRGERHPIFGNLEEEVKYHENFPTIYHLRQYLADNPEKTDLRLVYLALAHIIKFRGHFLIEGKFDTRNNDVQRLFQEFLAVYDNTFENSSLQEQNVQVEEILTDKISKSAKKDRVLKLFPNEKSNGRFAEFLKLIVGNQADFKKHFELEEKAPLQFSKDTYEEELEVLLAQIGDNYAELFLSAKKLYDSILLSGILTVTDVSTKAPLSASMIQRYNEHQMDLTQLKQFIRQKLSDKYNEVFSDVSKDGYAGYIDGKTNQEAFYKYLKGLLNKIEGSGYFLDKIEREDFLRKQRTFDNGSIPHQIHLQEMRAIIRRQAEFYPFLADNQDRIEKLLTFRIPYYVGPLASGKSDFAWLSRKSADKITPWNFDEIVDKESSAEAFINRMTNYDLYLPNQKVLPKHSLLYEKFTVYNELTKVKYKTEQGKTAFFDANMKQEIFDGVFKVYRKVTKDKLMDFLEKEFDEFRIVDLTGLDKENKVFNASYGTYHDLCKILDKDFLDNSKNEKILEDIVLTLTLFEDREMIRKRLENYSDLLTKEQVKKLERRHYTGWGRLSAELIHGIRNKESRKTILDYLIDDGNSNRNFMQLINDDALSFKEEIAKAQVIGETDNLNQVVSDIAGSPAIKKGILQSLKIVDELVKIMGHQPENIVVEMARENQFTNQGRRNSQQRLKGLTDSIKEFGSQILKEHPVENSQLQNDRLFLYYLQNGRDMYTGEELDIDYLSQYDIDHIIPQAFIKDNSIDNRVLTSSKENRGKSDDVPSKDVVRKMKSYWSKLLSAKLITQRKFDNLTKAERGGLTDDDKAGFIKRQLVETRQITKHVARILDERFNTETDENNKKIRQVKIVTLKSNLVSNFRKEFELYKVREINDYHHAHDAYLNAVIGKALLGVYPQLEPEFVYGDYPHFHGHKENKATAKKFFYSNIMNFFKKDDVRTDKNGEIIWKKDEHISNIKKVLSYPQVNIVKKVEEQTGGFSKESILPKGNSDKLIPRKTKKFYWDTKKYGGFDSPIVAYSILVIADIEKGKSKKLKTVKALVGVTIMEKMTFERDPVAFLERKGYRNVQEENIIKLPKYSLFKLENGRKRLLASARELQKGNEIVLPNHLGTLLYHAKNIHKVDEPKHLDYVDKHKDEFKELLDVVSNFSKKYTLAEGNLEKIKELYAQNNGEDLKELASSFINLLTFTAIGAPATFKFFDKNIDRKRYTSTTEILNATLIHQSITGLYETRIDLSKLGGD

SEQ ID NO: 166 - protein, 1355 aa, Streptococcus mutans
MKKPYSIGLDIGTNSVGWAVVTDDYKVPAKKMKVLGNTDKSHIKKNLLGALLFDSGNTAADRRLKRTARRRYTRRRNRILYLQEIFAEEMNKVDDSFFHRLDESFLTDDDKNFDSHPIFGNKAEEDAYHQKFPTIYHLRKHLADSTEKADLRLVYLALAHMIKFRGHFLIEGELNAENTDVQKLFADFVGVYDRTFDDSHLSEITVDASSILTEKISKSRRLEKLINNYPKEKKNTLFGNLIALSLGLQPNFKTNFKLSEDAKLQFSKDTYEEDLEELLGKIGDDYADLFTLAKNLYDAILLSGILTADDSSTKAPLSASMIKRYAEHHEDLEKLKEFIKANKPELYHDIFKDETKNGYAGYIENGVKQDEFYKYLKNTLSKIAGSDYFLDKIEREDFLRKQRTFDNGSIPHQIHLQEMHAILRRQGDYYPFLKENQDRIEKILTFRIPYYVGPLARKNSRFAWAEYHSDEAVTPWNFDQVIDKESSAQAFIEHMTNNDLYLPNEKVLPKHSPLYEKYTVYNELTKIKYVTEIGEAKFFDANLKQEIFDGLFKHERKVTKKKLRTFLDKNFDEFRIVDIQGLDKETETFNASYATYQDLLKVIKDKVFMDNPENAEILENIVLTLTLFEDREMIKQRLAKYADVFDKKVIDQLARRHYTGWGRLSAKLLNGIRDKQSCKTIMDYLIDDAQSNRNLMQLITDDNLTFKDDIVKAQYVDNSDDLHQVVQSLAGSPAIKKGILQSLKIVDELVKVMGKEPEQIVVEMARENQTTAKGRRNSQQRYKRLKEAIKSLDRDLNHKILKEHPTDNQALQNNRLFLYYLQNGRDMYTGESLDINRLSDYDIDHVIPQAFIKDNSIDNRVLTSSKANRGKSDDVPSEDVVNRMRPFWNKLLSSGLISQRKYNNLTKKELTLDDKAGFIKRQLVETRQITKHVARMLDERFNKEFDDNNKRIRRVKIVTLKSNLVSSFRKEFELYKVREINDYHHAHDAYLNAVVVKALLVKYPKLEPEFVYGEYPKYNSYRERKTATQKMFFYSNIMNMFKSKVKLADDQIVERPMIEVNDETGEIAWDKTKHITTVKKVLSYPQVNIVKKVEEQTIGQNGGLFDDNPKSPLEVIPSKLVPLKKALNPEKYGGYQKPTTAYPILLIVDTKQLIPISVMDKKRFEQNPVKFLKDKGYQQIEKNNFVKLPKYTLVDIGNGIKRLWASSKEVHKGNQLVVSKKSQDLLYHAHHLDNDYSNEYVKNHYQQFDILFNEITSFSKKCKLGKEHIQKIEEAYSKERDSASIEELADGFIKLLGFTQLGATSPFSFLGIKLNQKQYTGKKDYLLPCMEATLIHQSITGLYETRIDLSKLGGD

SEQ ID NO: 167 - protein, 1345 aa, Streptococcus mutans
MKKPYSIGLDIGTNSVGWAVVTDDYKVPAKKMKVLGNTDKSHIKKNLLGALLFDSGNTAADRRLKRTARRRYTRRRNRILYLQEIFAEEMSKVDDSFFHRLEDSFLVTEDKRGERHPIFGNLEEEVKYYENFPTIYHLRQYLADNPEKVDLRLVYLALAHIIKFRGHFLIEGKFDTRNNDVQRLFQEFLAVYDNTFENSSLQEQNVQVEEILTDKISKSAKKDRVLKLFPNEKSNGRFAEFLKLIVGNQADFKKHFELEEKAPLQFSKDTYEEDLEELLGKIGDDYADLFTLAKNLYDAILLSGILTADDSSTKAPLSASMIQRYNEHQMDLAQLKQFIRQKLSDKYNEVFSDVSKDGYAGYIDGKTNQEAFYKYLKGLLNKIEGSGYFLDKIEREDFLRKQRTFDNGSIPHQIHLQEMRAIIRRQAEFYPFLADNQDRIEKILTFRIPYYVGPLARGKSDFAWLSRKSADKITPWNFDEIVDKESSAEAFINRMTNYDLYLPNQKVLPKHSLLYEKFTVYNELTKVKYKTEQGKTAFFDANMKQEIFDGVFKVYRKVTKDKLMDFLEKEFDEFRIVDLTGLDKENKVFNASYGTYHDLCKILDKDFLDNSKNEKILEDIVLTLTLFEDREMIRKRLENYSDLLTKEQVKKLERRHYTGWGRLSAELIHGIRNKESRKTILDYLIDDGNSNRNFMQLINDDALSFKEEIAKAQVIGETDNLNQVVSDIAGSPAIKKGILQSLKIVDELVKIMGHQPENIVVEMARENQFTNQGRRNSQQRLKGLTDSIKEFGSQILKEHPVENSQLQNDRLFLYYLQNGRDMYTGEELDIDYLSQYDIDHIIPQAFIKDNSIDNRVLTSSKENRGKSDDVPSKDVVRKMKPYWSKLLSAKLITQRKFDNLTKAERGGLTDDDKAGFIKRQLVETRQITKHVARILDERFNTETDENNKKIRQVKIVTLKSNLVSNFRKEFELYKVREINDYHHAHDAYLNAVIGKALLGVYPQLEPEFVYGDYPHFHGHEENKATAKKFFYSNIMNFFKKDDVRTDKNGEIIWKKDEHISNIKKVLSYPQVNIVKKVEEQTGGFSKESILPKGNSDKLIPRKTKKFYWDTKKYGGFDSPIVAYSILVIADIEKGKSKKLKTVKALVGVTIMEKMTFERDPVAFLERKGYRNVQEENIIKLPKYSLFKLENGRKRLLASARELQKGNEIVLPNHLGTLLYHAKNIHKVDEPKHLDYVDKHKDEFKELLDVVSNFSKKYTLAEGNLEKIKELYAQNNGEDLKELASSFINLLTFTAIGAPATFKFFDKNIDRKRYTSTTEILNATLIHQSITGLYETRIDLSKLGGD

SEQ ID NO: 168 - protein, 1345 aa, Streptococcus mutans
MKKPYSIGLDIGTNSVGWAVVTDDYKVPAKKMKVLGNTDKSHIKKNLLGALLFDSGNTAEDRRLKRTTRRRYTRRRNRILYLQEIFSEEMGKVDDSFFHRLEDSFLVTEDKRGERHPIFGNLEEEVKYHENFPTIYHLRQYLADNPEKTDLRLVYLALAHIIKFRGHFLIEGKFDTRNNDVQRLFQEFLAVYDNTFENSSLQEQNVQVEEILTDKISKSAKKDRVLKLFPNEKSNGRFAEFLKLIVGNQADFKKHFELEEKAPLQFSKDTYEEELEVLLAQIGDNYAELFLSAKKLYDSILLSGILTVTDVSTKAPLSASMIQRYNEHQMDLTQLKQFIRQKLSDKYNEVFSDVSKDGYAGYIDGKTNQEAFYKYLKGLLNKIEGSGYFLDKIEREDFLRKQRTFDNGSIPHQIHLQEMRAIIRRQAEFYPFLADNQDRIEKLLTFRIPYYVGPLASGKSDFAWLSRKSADKITPWNFDEIVDKESSAEAFINRMTNYDLYLPNQKVLPKHSLLYEKFTVYNELTKVKYKTEQGKTAFFDANMKQEIFDGVFKVYRKVTKDKLMDFLEKEFDEFRIVDLTGLDKENKVFNASYGTYHDLCKILDKDFLDNSKNEKILEDIVLTLTLFEDREMIRKRLENYSDLLTKEQVKKLERRHYTGWGRLSAELIHGIRNKESRKTILDYLIDDGNSNRNFMQLINDDALSFKEEIAKAQVIGETDNLNQVVSDIAGSPAIKKGILQSLKIVDELVKIMGHQPENIVVEMARENQFTNQGRRNSQQRLKGLTDSIKEFGSQILKEHPVENSQLQNDRLFLYYLQNGRDMYTGEELDIDYLSQYDIDHIIPQAFIKDNSIDNRVLTSSKENRGKSDDVPSKDVVRKMKSYWSKLLSAKLITQRKFDNLTKAERGGLTDDDKAGFIKRQLVETRQITKHVARILDERFNTETDENNKKIRQVKIVTLKSNLVSNFRKEFELYKVREINDYHHAHDAYLNAVIGKALLGVYPQLEPEFVYGDYPHFHGHKENKATAKKFFYSNIMNFFKKDDVRTDKNGEIIWKKDEHISNIKKVLSYPQVNIVKKVEEQTGGFSKESILPKGNSDKLIPRKTKKFYWDTKKYGGFDSPIVAYSILVIADIEKGKSKKLKTVKALVGVTIMEKMTFERDPVAFLERKGYRNVQEENIIKLPKYSLFKLENGRKRLLASARELQKGNEIVLPNHLGTLLYHAKNIHKVDEPKHLDYVDKHKDEFKELLDVVSNFSKKYTLAEGNLEKIKELYAQNNGEDLKELASSFINLLTFTAIGAPATFKFFDKNIDRKRYTSTTEILKATLIHQSITGLYETRIDLSKLGGD

SEQ ID NO: 169 - protein, 1338 aa, Streptococcus mutans
MDLIGTNSVGWAVVTDDYKVPAKKMKVLGNTDKSHIKKNLLGALLFDSGNTAADRRLKRTARRRYTRRRNRILYLQEIFAEEMSKVDDSFFHRLEDSFLVTEDKRGERHPIFGNLEEEVKYHENFPTIYHLRQYLADNPEKVDLRLVYLALAHIIKFRGHFLIEGKFDTRNNDVQRLFQEFLAVYDNTFENSSLQEQNVQVEEILTDKISKSAKKDRVLKLFPNEKSNGRFAEFLKLIVGNQADFKKHFELEEKAPLQFSKDTYEEELEVLLAQIGDNYAELFLSAKKLYDSILLSGILTVTDVSTKAPLSASMIQRYNEHQMDLAQLKQFIRQKLSDKYNEVFSDVSKDGYAGYIDGKTNQEAFYKYLKGLLNKIEGSGYFLDKIEREDFLRKQRTFDNGSIPHQIHLQEMRAIIRRQAEFYPFLADNQDRIEKILTFRIPYYVGPLARGKSDFAWLSRKSADKITPWNFDEIVDKESSAEAFINRMTNYDLYLPNQKVLPKHSLLYEKFTVYNELTKVKYKTEQGKTAFFDANMKQEIFDGVFKVYRKVTKDKLMDFLEKEFDEFRIVDLTGLDKENKAFNASYGTYHDLRKILDKDFLDNSKNEKILEDIVLTLTLFEDREMIRKRLENYSDLLTKEQVKKLERRHYTGWGRLSAELIHGIRNKESRKTILDYLIDDGNSNRNFMQLINDDALSFKEEIAKAQVIGETDNLNQVVSDIAGSPAIKKGILQSLKIVDELVKIMGHQPENIVVEMARENQFTNQGRRNSQQRLKGLTDSIKEFGSQILKEHPVEHSQLQNDRLFLYYLQNGRDMYTGEELDIDYLSQYDIDHIIPQAFIKDNSIDNRVLTSSKENRGKSDDVPSKNVVRKMKSYWSKLLSAKLITQRKFDNLTKAERGGLTDDDKAGFIKRQLVETRQITKHVARILDERFHTETDENNKKIRQVKIVTLKSNLVSNFRKEFELYKVREINDYHHAHDAYLNAVIGKALLGVYPQLEPEFVYGDYPHFHGHKENKATAKKFFYSNIMNFFKKDDVRTDKNGEIIWKKDEHISNIKKVLSYPQVNIVKKVEEQTGGFSKESILPKGNSDKLIPRKTKKFYWDTKKYGGFDSPIVAYSILVIADIEKGKSKKLKTVKALVGVTIMEKMTFERDPVAFLERKGYRNVQEENIIKLPKYSLFKLENGRKRLLASARELQKGNEIVLPNHLGTLLYHAKNIHKVDEPKHLDYVDKHKDEFKELLDVVSNFSKKYTLAEGNLEKIKELYAQNNGEDLKELASSFINLLTFTAIGAPATFKFFDKNIDRKRYTSTTEILNATLIHQSITGLYETRIDLSKLGGD

SEQ ID NO: 170 - protein, 1373 aa, Streptococcus oralis
MENKNYSIGLDIGTNSVGWAVITDDYKVPSKKMKVLGNTDKRFIKKNLIGALLFDEGTTAEARRLKRTARRRYTRRKNRLRYLQEIFAEEMSKVDSSFFHRLDDSFLIPEDKKGSKYPIFATLIEEKEYHKQFPTIYHLRKQLADSKEKTDLRLIYLALAHMIKYRGHFLYEDTFDIKNNDIQKIFNEFISIYNNTFEGNSLSGQNVQVEAIFTDKISKSAKRERVLKLFPDEKSTGLFSEFLKLIVGNQADFKKHFDLEEKAPLQFSRDTYDEDLENLLGQIGDDFADLFVAAKKLYDAILLSGILTVTDPSTKAPLSASMIERYENHQKDLATLKQFIKTNLPEKYDEVFSDQSKDGYAGYIDGKTTQESFYKYIKNLLSKFEGADYFLEKIEREDFLRKQRTFDNGSIPHQIHLQEMNAILRRQGEHYPFLKENKEKIEKILTFRIPYYVGPLARGNRDFAWLTRNSDQAIRPWNFEEIVDKASSAESFINKMTNYDLYLPEEKVLPKHSLLYETFAVYNELTKVKFIAEGLRDYQFLDSRQKKDIFYTLFKAEDKRKVTEKDIIQYLHTVDGYDGIELKGIEKQFNASLSTYHDLLKIIKDKEFMDDPNNEEILENIVHTLTIFEDREMIKQRLAQYDSLFDEKVIKALTRRHYTGWGKLSSKLINGIRDKQTGKTILDYLMDDGYNNRNFMQLINDDELSFKEIIKKAQVVGKTDDVKQVVQELPGSPAIKKGILQSIKLVDELVKVMGHEPESIVIEMARENQTTARGKKNSQQRYKRIEDSLKILASGLNAKILKEHPTDNIQLQNDRLFLYYLQNGRDMYTGKPLDINQLSSYDIDHIVPQAFIKDDSLDNRVLTSLKDNRGKSDNVPSLEVVEKMKTFWQQLLDSKLISYRKFNNLTKAERGGLDERDKVGFIKRQLVETRQITKHVAQILDARYNTEVNEKDKKNRTVKIITLKSNLVSNFRKEFRLYKIREINDYHHAHDAYLNAVVAKAILKKYPKLEPEFVYGDYQKYDLKRYISRSKDPKEIEKATEKYFFYSNLLNFFKEEVHYADGTIVKRENIEYSKDTGEIAWNKEKDFATIKKVLSLPQVNIVKKREVQTGGFSKESILPKGNSDKLIPRKTKDILWDTTKYGGFDSPVIAYSILLIADIEKGKAKRLKTVKTLVGITIMEKATFEKSPIAFLENKGYHNVRKENILCLPKYSLFELKNGRRRMLASAKELQKGNEIVLPVHLTTLLYHAKNIHRLDEPEHLEYIQKHRNEFKGLLNLVSEFSQKYVLADANLEKIKNLYADNEQADIEILANSFINLLTFTALGAPAAFKFFGKDVDRKRYTTVSEILNATLIHQSITGLYETRIDLSKLGED

SEQ ID NO: 171 - protein, 1371 aa, Streptococcus oralis
MENKNYSIGLDIGTNSVGWSVITDDYKVPSKKMKVLGNTDKRFIKKNLIGALLFDEGTTAEARRLKRTARRRYTRRKNRLRYLQEIFAEEMSKVDSSFFHRLDDSFLIPEDKRGSKYPIFATLAEEKEYHKQFPTIYHLRKQLADSKEKTDLRLIYLALAHMIKYRGHFLYEDTFDIKNNDIQKIFSEFISIYDNTFEGSSLSGQNAQVEAIFTDKISKSAKRERVLKLFPDEKSTGLFSEFLKLIVGNQADFKKHFDLGEKAPLQFSKDTYDEDLENLLGQIGDDFADLFLVAKKLYDAILLSGILTVTDPSTKAPLSASMIERYENHQKDLAVLKQFIKNNLPEKYDEVFSDQSKDGYAGYIDGKTTQEAFYKYIKNLLSKFEGTDYFLEKIEREDFLRKQRTFDNGSIPHQIHLQEMNAILRRQGEHYPFLKDNKEKIEKILTFRIPYYVGPLARGNRDFAWLTRNSDEAIRPWNFEEIVDKASSAEDFINKMTNYDLYLPEEKVLPKHSLLYETFAVYNELTKVKFIAEGLRDYQFLDSGQKKQIVTQLFKEKRKVTEKDIIQFLHNVDGYDGIELKGIEKQFNASLSTYHDLLKIIKDKEFMDDSKNEEILENIVHTLTIFEDREMIKQRLAQYDSLFDEKVIKALIRRHYTGWGKLSAKLIDGICDKQTGNTILDYLIDDGKNNRNFMQLINDDGLSFKEITQKAQVVGKTDDVKQVVQELPGSPAIKKGILQSIKIVDELVKVMGHTPESIVIEMARENQTTARGKKNSQQRYKRIEDALKNLASGLDSNILKEHPTNNIQLQNDRLFLYYLQNGRDMYTGKPLDINQLSSYDIDHIVPQAFIKDDSLDNRVLTSLKDNRGKSDNVPSIEVVQKRKAFWQQLLDSKLISERKFNNLTKAERGGLDERDKVGFIKRQLVETRQITKHVAQILDARFNKEVNEKDKKNRTVKIITLKSNLVSNFRKEFRLYKVREINDYHHAHDAYLNAVVAKAILKKYPKLEPEFVYGDYQKYDLKRYISRSRNPKEVEKATEKYFFYSNLLNFFKEEVHYADGTIVKRENIEYSKDTGEIAWNKEKDFATIKKVLSYPQVNIVKKREVQTGGFSKESILPKGNSDKLIPRKTKDILWETTKYGGFDSPVIAYSILLIADIEKGKAKKLKTVKTLVGITIMEKAAFEENPITFLENKGYHNVRKENILCLPKYSLFELENGRRRLLASAKELQKGNEIVLPVYLTTLLYHSKNVHKLDEPEHLEYIQKHRNEFKDLLNLVSEFSQKYVLADANLEKIQNLYADNEQADIEILANSFINLLTFTALGAPAAFKFFGKDIDRKRYTTVSEILNATLIHQSITGLYETRIDLSKLGED

SEQ ID NO: 172 - protein, 1366 aa, Streptococcus parasanguinis
MKKPYSIGLDIGTNSVGWAVITDDYKVPAKKMKVLGNTNKESIKKNLIGALLFDAGNTAADRRLKRTARRRYTRRRNRILYLQEIFAAEMNKVDESFFHRLDDSFLVPEDKRGSKYPIFGTLEEEKEYHKQFPTIYYLRKILADSKEKVDLRLIYLALAHIIKYRGHFLYEDSFDIKNNDIQKIFNEFTILYDNTFEESSLSKGNAQVEEIFTDKISKSAKRDRVLKLFPDEKSTGLFSEFLKLIVGNQADFKKHFDLEEKAPLQFSKDTYEEDLESLLGQIGDVYADLFVVAKKLYDAILLAGILSVKDPGTKAPLSASMIERYDNHQNDLSALKQFVRRNLPEKYAEVFSDDSKDGYAGYIDGKTTQEGFYKYIKNLISKIEGAEYFLEKIEREDFLRKQRTFDNGSIPHQIHLQEMNAILRHQGEYYPFLKENKDKIEQILTFRIPYYVGPLARGNSDFAWLSRNSDEAIRPWNFEEMVDKSSSAEDFIHRMTNYDLYLPEEKVLPKHSLLYETFTVYNELTKVKYIAEGMKDYQFLDSGQKKQIVNQLFKEKRKVTEKDIIHYLHNVDGYDGIELKGIEKHFNSSLSTYHDLLKIIKDKEFMDDPKNEEIFENIVHTLTIFEDRVMIKQRLNQYDSIFDEKVIKALTRRHYTGWGKLSAKLINGIRDKKTSKTILDYLIDDGYSNRNFMQLINDDGLSFKETIQKAQVVGETNDVKQVVQELPGSPAIKKGILQSIKIVDELVKVMGHAPESVVIEMARENQTTNKGKSKSQQRLKTLSDAISELGSNILKEHPTDNIQLQNDRLFLYYLQNGKDMYTGEALDINQLSNYDIDHIIPQAFIKDDSLDNRVLTSSKDNRGKSDNVPSLEIVEKMKGFWQQLLDSKLISERKFNNLTKAERGGLDERDKVGFIKRQLVETRQITKHVAQILDDRFNAEVNEKNQKLRSVKIITLKSNLVSNFRKEFGLYKVREINDYHHAHDAYLNAVVAKAILKKYPKLEPEFVYGDYQKYDLKRYISRTKDPKEIEKATEKYFFYSNLLNFFKDKVYYADGTIIQRGNVEYSKDTGEIAWNKKRDFAIVRKVLSYPQVNIVKKTEEQTGGFSKESILPKGNSDKLIPRKTKNVQLDTTKYGGFDSPVIAYSILLVADVEKGKSKKLKTVKSLIGITIMEKVKFEANPVAFLEGKGYQNVVEENIIRLPKYSLFELENGRRRMLASAKELQKGNEMVLPSYLIALLYHAKRIQKKDEPEHLEYIKQHHSEFNDLLNFVSEFSQKYVLAESNLEKIKNLYIDNEQTNMEEIANSFINLLTFTAFGAPAVFKFFGKDIERKRYSTVTEILKATLIHQSLTGLYETRIDLSKLGEE

SEQ ID NO: 173 - protein, 1337 aa, Streptococcus parauberis
MKVLGNTDRQTVKKNMIGTLLFDSGETAEARRLKRTARRRYTRRINRIKYLQSIFDDEMSKIDSAFFQRIKDSFLVPDDKNDDRHPIFGNIKDEVDYHKNYPTIYHLRKKLADSDEKADLRLIYLALAHIIKFRGHFLIEGDLDSQNTDVNALFLKLVDTYNLMFEDDKIDTQTIDATVILTEKMSKSRRLENLIAKIPNQKKNTLFGNLISLSLGLTPNFKANFELSEDAKLQISKESFEEDLDNLLAQIGDQYADLFIAAKNLSDAILLSDILTVKGVNTKAPLSASMVQRFNEHQDDLKLLKKLVKVQLPEKYKEIFDIKDKNGYAGYINGKTSQEDFYKYIKPILSKLKGAESLISKLEREDFLRKQRTFDNGSIPHQIHLNELKSIIRRQEKYYPFLKDKQVRIEKIFTFRIPYFVGPLANGNSSFAWVKRRSNESITPWNFEEVVEQEASAKVFIERMTNFDTYLPEEKVLPKHSLLYEMFTVYNELTKVKYQAEGMRKPEFLSSEEKIEIVSNLFKTERKVTVKQLKENYFNKIRCLDSITISGVEDKFNASLGTYHDLLNIIKNQKILDDEQNQDSLEDIVLTLTLFEDEKMIAKRLSKYESIFDPSILKKLKKRHYTGWGRLSQKLINGIRDKQTGKTILDFLIEDGQANRNFMQLINDPSLDFASIIKEAQEKTIKSEKLEETIANLAGSPAIKKGILQSVKIVDEVVKVMGYEPSNIVIEMARENQSTQRGINNSRERLRKLEEVHKNIGSKILKEHEISNAQLQSDRVYLYLLQDGKDMYTGKDLDFDRLSQYDIDHIIPQSFIKDNSIDNIVLTSQESNRGKSDNVPYIAIVNKMKSYWQHQLKSGAISQRKFDNLTKAERGGLSEYDKAGFIKRQLVETRQITKHVAQILNNRFNNNVDDSSKNKRPVKIITLKSKMVSDFRKEFGFYKIREVNDYHHAHDAYLNAVVGTALLKKYPKLEAEFVYGDYKHYDLASLVVKSDTSLGKATAKMFFYSNIMNFFKKEVRLADGTVITRPQIETNTETGEIVWDKVKDIKTIRKVLSIPQINVVKKTEVQTGGFSKESILSKRDSDKLIPRKNNWDPKKYGGFGSPIIAYSVLVVAKVTKGKSQKTKSVKELVGITIMEQNEFEKDRITFLEKKGYQDIQESLIIKLPKFSLFELENGRKRLLASAKELQKGNELSLPNKYIQFLYLASRYTSFSGKEEDREKHRHFVESHLHYFDEIKDIIADFSRRYILADANLEKILTLYNEKNQFSIEEQATNMLNLFTFTGLGAPATLKFFNVDIDRKRYTSSTEILNSTLIRQSITGLYETRIDLSKIGGD

SEQ ID NO: 174 - protein, 1368 aa, Streptococcus phocae
MVEKKSYSIGLDIGTNSVGWAVITDDYKVPAKKMKVLGNTSRQSIKKNMIGALLFDEGGPAASTRVKRTTRRRYTRRKNRLCYLRDIFESEMHTIDKHFFLRLEDSFLHKSDKRYEAHPIFGTLQEEKAYHDNYPTIYHLRKALADNTEKADLRLIYLALAHIIKFRGHFLIEGALSANNTDVQQLVHALVDAYNIMFEEDQLDIEAIDVKAILTEKISKTRRLENLISNIPGQKKNGLFGNLIALSLGLTPNFKSHFNLPEDAKLQLAKDTYDEELNNLLTQIGDEYADLFLSAKNLSDAILLSDILTVNGDGTQAPLSASLIKRYEEHRQDLALLKQMFKEQLPDLYRDVFTDENKDGYAGYISGKTSQEAFYKYIKPILETLDGAEDFLTKINREDFLRKQRTFDNGSIPHQIHLGELQAILERQQAYYPFLKDNQEKIEKILTFRIPYYIGPLARGNSRFAWLTRTSDQKITPWNFDEMVDQEASAQAFIERMTNFDEYLPQEKVLPKHSLTYEYFTVYNELTKVKYVTEGMTKPEFLSAGQKEQIVELLFKKYRKVTVKQLKEDFFSKIECFDTVDISGVEDKFNASLGTYHDLLKIIKDKAFLDNSENENIIEDIILTLTLFEDKEMIANRLAVYEDLFDQNVLKQLKRRHYTGWGRLSKQLINGMRDKHTGKTILDFLKADGFINRNFMQLINDDNLSFKEEIKKAQEGGLKDSINDQIRDLAGSPAIKKGILQTINIVDEIVKIMGKAPQHIVVEMARDVQKTDIGVKQSRERMKRVQEVLKKLGSQLLKEHPVENFQLQNERLYLYYLQNGKDMYTGEELSISNLSHYDIDHIIPRSFIKDDSIDNKVLTRSEHNRGKTDNVPSIEVVKRMKPYWQKLLDTKVISQRKFDNLTKAERGGLQESDKANFIQRQLVETRQITKHVAQILDSRFNTERDEKDRPIRRVKVITLKSKFVSDFRQDFGFYKLREINDYHHAHDAYLNAVVGTALLKMYPKLASEFVYGDYQKYDLKRMVGKSGKASGHATAKYFFYSNLMNFFKSEVKLANGNIIKRSPIEVNEETGEIVWDKTKDFGTVRKVLSAPQVNIVKKTEIQTGGFSNETILSKGKSSKLIPRKNKWRDTTKYGGFNTPTVAYSVLVVAKVEKGKAKKLKPVKELVGITIMERTKFEANPIAFLESKGYHDIQEHLMITLPKYSLFELENGRRRLLASATELQKGNEMVLPQHLVTFLYRVSKRDKGTQSENMEYISNHKEKFIEIFHYIIRYAEKNVIKPKVIERLNDTFNQKFNDSDLTELSISFLNLFKFTSFGAPEKFTFLNSEIKQDDVRYRSTKECLNSTLIHQSVTGLYETRIDLSQFGGD

SEQ ID NO: 175 - protein, 1376 aa, Streptococcus pseudopneumoniae
MSNKPYSIGLDIGTNSVGWAVITDDYKVPSKKMKVLGNTDKHFIKKNLIGALLFDEGTTAEDRRLKRTARRRYTRRKNRLRYLQEIFSEEISKVDNSFFHRLDDSFLVPEDKRGSKYPIFATLTEEKEYYKQFPTIYHLRKQLADSKEKADLRLIYLTLAHMIKYRGHFLYEESFDIKNNDIQKIFNEFISIYDNTFEGSSLSGQNAQVEAIFTDKISKSTKRERVLKLFPDQKSTGLFSEFLKLIVGNQADFKKHFDLEEKAPLQFSKDTYDEDLENLLGQIGDDFADLFLVAKKLYDAILLSGILTVTDPSTKAPLSASMIERYENHQKDLAALKQFIKNNLPEKYDEVFSDQSKEGYAGYIDSKTTQEAFYKYIKNLLSKIDGADYLLDKIEREDFLRKQRTFDNGSIPHQIHLQEMNAILRRQGEHYPFLKENREKIEKILTFRIPYYVGPLARGNRDFAWLTRNSDQAIRPWNFEEIVDKASSAEAFINKMTNYDLYLPEEKVLPKHSLLYETFAVYNELTKVKFIAEGLRDYQFLDSGQKKKIINQLFKEKRKVTEKDLIHYLHNVDGYDGIELKGIEKQFNASLSTYHDLLKIIKDKRFMDEPKNQEILENIVHTLTIFEDREMIKQRLAQYASIFDEKVIKTLTRRHYTGWGKLSAKLINCIRDRKTGKTILDYLIDDGYNNRNFMQLINDDGLSFKEIIQESQVVGKPDDVKQIVQELPGSSAIKKGILQSIKLVDELVKVMGHDPESIVIEMARENQTTARGKKNSQQRYKRIEDSLKILASGLNSNILKEHPTDNIQLQNDRLFLYYLQNGKDMYTGNPLDINHLSSYDIDHIIPQAFIKDDSLDNRVLTSSKDNRGKSDNVPSLEVVQKRKAFWQQLLESKLISERKFNNLTKAERGGLNERDKVGFIKRQLVETRQITKHVAQILDSRFNTKVNEKNQKIRTVKIITLKSNLVSNFRKEFRLYKVREINDYHHAHDAYLNAVVAKAILKKYPKLEPEFVYGDYQKYDLKRYISRSRDPKEIEKATEKYFFYSNLLNFFKEEVHYADGTIVKRENIEYSKDTGEIAWNKEIDFATIRKILSLSQVNIVKKTEEQTVGQNGGLFDNNIVSKKKVVDASKLIPIKSGLSPEKYGGYARPTIAYSVLVIADIEKGKAKKLKRIKEMVGITIQDKKKFEANPTAYLEEYGYKNINPNLIIKLPKYSLFKFNDGQRRLLASSIELQKGNELILPYHFTTLLYHAQRINKISEPIHKQYVETHQSEFEELLTTIISLSKKYIQKPIVESLLQQAFEQADKDIYQLSESFISLLKLTSFGAPGAFRFLGVEISQSNVRYQSVSSCFNATLIHQSITGLYETRIDLSKLGED

SEQ ID NO: 176 - protein, 1376 aa, Streptococcus pseudopneumoniae
MSNKPYSIGLDIGTNSVGWVIITDDYKVPSKKMKVLGNTDKHFIKKNLIGALLFDEGTTAEDRRLKRTARRRYTRRKNRLRYLQEIFAEEMNKVDSSFFHRLDDSFLVPEDKRGSKYPIFATLAEEKEYHKNFPTIYHLRKQLADSKEKADLRLIYLALAHMIKYRGHFLYEEAFDIKNNDIQKIFNEFINIYDNTFEGSSLSGQNEQVEAIFSDKISKSAKRERVLKLFPDEKSTGLFSEFLKLIVGNQADFKKHFDLEEKAPLQFSKDTYDEDLENLLGQIGDGFADLFLVAKKLYDAILLSGILTVTDPSTKAPLSASMIERYQNHQNDLASLKQFIKNNLPEKYDEVFSDQSKDGYAGYVDGKTTQEAFYKYIKNLLSKFEGADYFLEKIEREDFLRKQRTFDNGSIPHQIHLQEMNAILRRQGEHYPFLKENKEKIEKILTFRIPYYVGPLARGNRDFAWLTRNSDQAIRPWNFEEIVDKASSAEDFINKMTNYDLYLPEEKVLPKHSLLYETFAVYNELTKVKFIAEGLRDYQFLDSGQKKQIVNQLFKEKRKVTEKDIIQYLHNVDGYDGIELKGIEKQFNASLSTYHDLLKIIKDKEFMDDSKNEEILENIVHTLTIFEDREMIKQRLAQYDSIFDEKVIKALTRRHYTGWGKLSAKLINGIRDKQTGKTILDYLIDDGYSNRNFMQLINDDGLSFKEIIQKAQVFGKTNDVKQVVQELPGSPAIKKGILQSIKIVEELVKVMGHEPESIVIEMARENQTTTRGKKNSQQRYKRIENSLKILASGLNSKILKEHPTDNNQLQNDRLFLYYLQNGKDMYTGEALDINQLSSCDIDHIIPQAFIKDDSLDNRVLTSSKENRGKSDNVPCLEVVDKMKVFWQQLLDFKLISYRKFNNLTKAERGGLDERDKVGFIRRQLVETRQITKHVAQILDSRFNTEVTEKDKKNRNVKIITLKSNLVSNFRKEFGLYKVREINDYHHAHDAYLNAVVAKAILKKYPKLEPEFVYGDYQKYDLKRYISRSKDPKDIEKATEKYFFYSNLLNFFKEEVHYADGTIVKRENIEYSKDTGEIAWNKEKDFATIKKILSLPQVNIVKKTEEQTVGQNGGLFDNNIVSKKKVVDASKLIPIKSGLSPEKYGGYARPTIAYSVLVIADIEKGKTKKLKRIKEMIGITVQDKKIFESNPIAYLEECGYKNINPNLIIKLPKYSLFEFNGGQRRLLASSIELQKGNELILPYHFTALLYHTQRINKISEPIHKQYVEAHQNEFKELLTTIISLSKKYIQKPNVESLLQQAFEQADKDIYQLSESFISLLKLTSFGAPGAFKFLGVEISQSSVRYKPNSQFLDATLIHQSITGLYETRIDLSKLGED

SEQ ID NO: 177 - protein, 1378 aa, Streptococcus pseudopneumoniae
MSNKPYSIGLDIGTNSVGWAVITDDYKVPSKKMTVLGNTDKHFIKKNLIGALLFDEGTTAEDRRLKRTARRRYTRRKNRLRYLQEIFSGEMSKVDSSFFHRLDDSFLVPEDKRGSKYPIFATLVEEKEYHKQFPTIYHLRKQLADSKEKADLRLIYLVLAHMIKYRGHFLYEEAFDIKNNDIQKIFNEFISIYDNTFEGSSLSGQNAQVETIFTDKISKSAKRERVLKLFPDEKSTGLFSEFLKLIVGNQADFKKHFDLGEKAPLQFSKDTYDEDLENLLGQIGDDFADLFLVAKKLYDAILLSGILTVTDPSTKAPLSASMIERYENHQKDLTTLKQFIKNNLPEKYDEVFSDQSKDGYAGYIDGKTTQEAFYKYIKNLLSKFEGTDYFLEKIEREDFLRKQRTFDNGSIPHQIHLQEMNAILRRQGEHYPFLKENKEKIEKILTFRIPYYVGPLARGNRDFAWLTRNSDQAIRPWNFEEIVDKASSAEDFINKMTNYDLYLPEEKVLPKHSLLYETFAVYNELTKVKFIAEGLRDYQFLDSGQKKQIVNQLFKEKRKVTEKDIIHYLHTVDGYDGIELKGIEKQFNASLSTYHDLLKIIKDKEFMDDSKNEAILENIVHTLTIFEDREMIKQRLAQYDSLFDKKVIKALTRRHYTGWGKLSAKLINGICDKQTGNTILDYLIDDGEINRNFMQLINDDGLSFKKIIQKSQVVGETDDVKQVVRELPGSPAIKKGILQSIKIVDELVKVMDHAPESIVIEMARENQTTARGKKNSQQRYKRIEDSLKILASGLDSNILKENPTDNNQLQNDRLFLYYLQNGKDMYTGEALDINQLSSYDIDHIIPQAFIKDDSLDNRVLTSSKDNRGKSDNVPSLEVVQKRKAFWQQLLDSKLISERKFNNLTKAERERDGLNELDKVGFIKRQLVETRQITKHVAQILDARFNKEVTEKDKKNRNVKIITLKSNLVSNFRKEFRLYKVREINDYHHAHDAYLNAVVAKAILKKYPKLEPEFVYGDYQKNDLKRYISRSKDPKDIEKATEKYFFYSNLLNFFKEEVHYADGTIVKRENIEYSKDTGEIAWNKEKDFATIKKVLSYPQVNIVKKTEEQTVGQNGGLFDNNIVSKEKVVDASKLIPIKSGLSPEKYGGYARPTIAYSVLVIADIEKGKTKKLKRIKEMVGITIQDKKKFEANPIAYLEECGYKNINPNLIIKLPKYSLFEFNGGQRRLLASSIELQKGNELILPYHFTALLYHAQRINKFSEPIHKQYVEAHQNEFKELLTIIISLSKKYIQKPNVESLLHQAFEQADNDIYQLSESFISLLKLTSFGAPGAFKFLGAEISQSSVRYKPNSQFLDTTLIHQSITGLYETRIDLSKLGED

SEQ ID NO: 178 - protein, 1374 aa, Streptococcus pseudoporcinus
MKKRYSYSIGLDIGTNSVGWAVINEDYKVPAKKMTVFGNTDRKTIKKNLLGTVLFDSGETAQARRLKRTNRRRYTRRRYRLCQLQNIFATEMVKVDDTFFQRLSESFFYYQDKAFDKHPIFGNSKEERAYHKTYPTIYHLRKDLADRDQKADLRLIYLALSHIIKFRGHFLIEGKLNSENTDVQKLFIALVTVYNLLFEEEPIAGETCDAKALLTAKTSKSKRLESLISEFPGQKKNGLFGNLLALALGLRPNFKSNFGLSEDAKLQITKDTYEEELDNLLAEIGDHYADLFLAAKNLSDAILLSDILTLSDENTRAPLSASMIKRYEEHQEDLALLKKLVKEQMPEKYWEIFSNAKKNGYAGYIEGKVSQEDFYRYIKPILSRLKGGDEFLAKIDRDDFLRKQRTFDNGSIPHQIHLKELHAILRRQEKYYPFLAEQKEKIEQLLCFRIPYYVGPLAKGGNSSFAWLKRRSDEPITPWNFKDVVDEEASAQAFIEGMTNYDTYLPEEKVLPKHSPLYEMFTVYNELTKVKYIAENMTKPLYLSAEQKEAIIDHLFKQTRKVTVKDLKEKYFSQIEGLENVDVTGVEGAFNASLGTYNDLLKIIKDKAFLDDEANAEILEEIVLILTLFQDEKLIEKRLAKYANLFEKSVLKKLRKRHYRGWGRLSRQLIDGMKDKASGKTILDFLKADDFANRNFIQLINDSSLDFEKLIDDAQKKAIKRESLTEAVANLAGSPAIKKGILQSLKVVDEIVKVMGHNPDNIVIEMSRENQTTAQGLKNARQRLKKIKEVHKKTGSRILEDNSERITNLTLQDNRLYLYLLQDGKDMYTGQDLDINNLSQYDIDHIIPQSFIKDNSIDNLVLTTQKANRGKSDNVPSIEVVRDMKDRVWRRQLANGAISRQKFDHLTKAERGGLADSDKARFLRRQLVETRQITKHVAQLLDSRFNSKSNQNKKLARNVKIITLKSKIVSDFRKDFGLYKLREVNNYHHAHDAYLNAVVGTALLKKYPKLEAEFVYGDYKHFDLVKLISKSDPSLGKATAKVFFYSNIMNFFKEELSLADGTLMKRPVIETNTETGEVVWDKVKDFKTIRKVLSYPQVNIVKKTEIQSGAFSKESVLSKGNSDKLIERKKGWDPKKYGGFDSPNTAYSIFVVAKVAKRKAQKLKTVKEIVGITIMEQAEYEKDNIAFLEKKGYQDIQEKLLIKLPKYSLFELENGRRRLLASANEFQKGNELALSGKYMKFLYLASRYDKLSSKIESEQQKKLFVEQHLHYFDEILDIVVKHATCYIKAENNLKKIISLYKKKEAYSINEQALNMLNLFIFTSLGAPSTFVFFDETIDRKRYTTSSDVLNGILIQQSITGLYETRIDLSRFGGD

SEQ ID NO: 179 - protein, 1326 aa, Streptococcus pseudoporcinus
MLGTVLFDSGETAQARRLKRTNRRRYTRRRYRLCQLQNIFATEMVKVDDTFFQRLSESFFYYQDKAFDKHPIFGNSKEERAYHKTYPTIYHLRKDLADRDQKADLRLIYLALSHIIKFRGHFLIEGKLNSENTDVQKLFIALVTVYNLLFEEEPIAGETCDAKALLTAKTSKSKRLESLISEFPGQKKNGLFGNLLALALGLRPNFKSNFGLSEDAKLQITKDTYEEELDNLLAEIGDHYADLFLAAKNLSDAILLSDILTLSDENTRAPLSASMIKRYEEHQEDLALLKKLVKEQMPEKYWEIFSNAKKNGYAGYIEGKVSQEDFYRYIKPILSRLKGGDEFLAKIDRDDFLRKQRTFDNGSIPHQIHLKELHAILRRQEKYYPFLAEQKEKIEQLLCFRIPYYVGPLAKGGNSSFAWLKRRSDEPITPWNFKDVVDEEASAQAFIEGMTNYDTYLPEEKVLPKHSPLYEMFTVYNELTKVKYIAENMTKPLYLSAEQKEAIIDHLFKQTRKVTVKDLKEKYFSQIEGLENVDVTGVEGAFNASLGTYNDLLKIIKDKAFLDDEANAEILEEIVLILTLFQDEKLIEKRLAKYANLFEKSVLKKLRKRHYRGWGRLSRQLIDGMKDKASGKTILDFLKADDFANRNFIQLINDSSLDFEKLIDDAQKKAIKRESLTEAVANLAGSPAIKKGILQSLKVVDEIVKVMGHNPDNIVIEMSRENQTTAQGLKNARQRLKKIKEVHKKTGSRILEDNSERITNLTLQDNRLYLYLLQDGKDMYTGQDLDINNLSQYDIDHIIPQSFIKDNSIDNLVLTTQKANRGKSDNVPSIEVVRDMKDRVWRRQLANGAISRQKFDHLTKAERGGLADSDKARFLRRQLVETRQITKHVAQLLDSRFNSKSNQNKKLARNVKIITLKSKIVSDFRKDFGLYKLREVNNYHHAHDAYLNAVVGTALLKKYPKLEAEFVYGDYKHFDLVKLISKSDPSLGKATAKVFFYSNIMNFFKEELSLADGTLMKRPVIETNTETGEVVWDKVKDFKTIRKVLSYPQVNIVKKTEIQSGAFSKESVLSKGNSDKLIERKKGWDPKKYGGFDSPNTAYSIFVVAKVAKRKAQKLKTVKEIVGITIMEQAEYEKDNIAFLEKKGYQDIQEKLLIKLPKYSLFELENGRRRLLASANEFQKGNELALSGKYMKFLYLASRYDKLSSKIESEQQKKLFVEQHLHYFDEILDIVVKHATCYIKAENNLKKIISLYKKKEAYSINEQALNMLNLFIFTSLGAPSTFVFFDETIDRKRYTTSSDVLNGILIQQSITGLYETRIDLSRFGGD

SEQ ID NO: 180 - protein, 1370 aa, Streptococcus sanguinis
MKKPYSIGLDIGTNSVGWAVVTDDYKVPAKKMRVFGDTDRSHIKKNLLGTLLFDDGNTAESRRLKRTARRRYTRRRNRILYLQEIFTESMNEIDESFFHRLDDSFLVPEDKRGSKYPIFATLQEEKEYHKQFPTIYHLRKQLADSKEKSDVRLIYLALAHMIKYRGHFLYEETFDIKNNDIQKIFNEFINIYDNTFEGSSLSGQNAQVEAIFTDKISKSAKRERVLKLFPDEKSTGLFSEFLKLIVGNQADFKKHFDLEEKAPLQFSKDTYDEELENLLGQIGDDFADLFLIAKKLYDAILLSGILTVTDPSTKAPLSASMIERYENHQKDLAALKQFIKNNLPEKYVEVFSDQSKDGYAGYIDGKTTQEAFYKYIKNLLSKFEGADYFLDKIEREDFLRKQRTFDNGSIPHQIHLQEMNAILRRQGEHYPFLKENREKIEKILTFRIPYYVGPLARDNRDFSWLTRNSDEPIRPWNFEEVVDKARSAEDFIHRMTNYDLYLPEEKVLPKHSLLYETFAVYNELTKVKFIAEGLRDYQFLDSGQKKQIVNQLFKEKRKVTEKDIIHYLHNVDGYDGIELKGIEKQFNANLSTYHDLLKITKDKEFMDDPKNEEILENIVHTLTIFEDREMIKQRLAQYDTLFDEKVIKALTRRHYTGWGKLSAKLINGIRDKQSGKTILDYLIDDDKINRNFMQLINDDGLSFKEIIQKAQVVGKTDDVKQVVQELPGSPAIKKGILQSIKIVDELVKVMGYALESIVIEMARENQTTARGKKNSQQRYKRIEDALKNLAPGLDSNILKENPTDNIQLKNDRLFLYYLQNGKDMYTGKPLDINQLSSYDIDHIIPQAFIKDDSIDNRVLTSSKDNRGKSDNVPSLEVVQKRKAFWQQLLDSKLISERKFNNLTKAERGGLDERDKVGFIRRQLVETQQITKNVAQILDARFNTEVKEKNQKIRTVKIITLKSNLVSNFRKEFGLYKVREINNYHHAHDAYLNAVVAKAILKKYPKLEPEFVYGDYQKYDLKKYISRFKPSKEIEKATEKYFFYSNLLNFFKEEVLYADGTIRKRENIEYSKDTGEIAWDKEKDFATIKKVLSYPQVNIVKKREVQTGGFSKESILPKGNSDKLIPRKTKDILWDTTKYGGFDSPVIAYSILLIADIEKGKAKKLKTVKTLVGITIMEKAAFEENPITFLENKGYHNVRKENILCLPKYSLFELENGRRRLLASAKELQKGNEIVLPVCLTTLLYHSKNLHKLDEPEHLEYIQKHRNEFKDLLNLVSEFSQKYILAEANLEKIKDLYADNEQADIEILANSFINLLTFTALGAPAAFKFFGKDVDRKRYTTVSEILNATLIHQSITGLYETRIDLSKLGEE

SEQ ID NO: 181 - protein, 1377 aa, Streptococcus sanguinis
MKKPYSIGLDIGTNSVGWAVITDDYKVPSKKMKVLGNTDKHFIKKNLIGALLFDEGTTAEDRRLKRTSRRRYTRRKNRLRYLQEIFSEEISKLDSSFFHRLDDSFLVPEDKRGSKYPIFATLEEEKEYHKKFPTIYHLRKHLADSKEKTDLRLIYLALAHMIKYRGHFLYEESFDIKNNDIQKIFNEFISIYDNTFEGSSLSGQNAQVEAIFTDKISKSTKRERVLKLFSDEKSTGLFSEFLKLIVGNQADFKKHFDLEEKAPLQFSKDTYDEDLENLLGQIGDGFADLFLVAKKLYDAILLSGILTVTDPSTKAPLSASMIERYENHQEDLAALKQFIKNNLSEKYAEVFSDQSKDGYAGFIDGKTTQEAFYKYIKNLLSKLEGADYFLNKIEREDFLRKQRTFDNGSIPHQIHLQEMNAILRRQGEHYLFLKENREKIEKILAFRIPYYVGPLARGNRDFAWLTRNSDQAIRPWNFEEVVDKASSAEDFINKMTNYDLYLPEEKVLPKHSLLYETFAVYNELTKVKFIAEGLRDYQFLDSGQKKQIVNQLFKDKRKVTEKDIIHYLHNVDGYDGIELKGIEKQFNASLSTYHDLLKIIKDKEFMDNPKNGEILENIIHTLTIFEDREMIKQRLAQYDTLFDEKVIKALTRRHYTGWGKLSAKLINGIRDKQTGKTILEYLIDDGDCNRNFMQLINDDGLSFKEIIQKAQVVGKTDDVKQVVQEIPGSPAIKKGILQSIKIVDELVKVMGHNPESIVIEMARENQTTAKGKKNSQQRYKRIEDALKNLAPGLDSNILKENPTDNIQLQNDRLFLYYLQNGKDMYTGKAIDINQLSNYDIDHIIPQAFIKDDSLDNRVLTSSKDNRGKSDNVPSIEVVQKRKAFWQQLLDSKLISERKFNNLTKAKRGGLDERDKVGFIKRQLVETRQITKHVAQLLDTRFNTEVNEENQKIRTVKIITLKSNLVSNFRKEFGLYKVREINDYHHAHDAYLNAVVAKAILKKYPKLEPEFVYGDYQKYDLKRYILKSKASNTIDKATEKYFFYSNLLNFFKEKVRYADGTIKKRENIEYSNDTGEIAWNKEKDFATIKKVLSLPQVNIVKKTEEQTVGQNGGLFDNNIVSKKKVVDASKLIPIKSSLSPEKYGGYARPTIAYSVLVIADIEKGKGKAKKLKRIKEIVGITIQDKKKFESNPVTYLEECGYKNINSNLIIKLPKYSLFEFNDGQRRLLASSIELQKGNELILPYHLTALLYHAQRINKISEPIHKQYVEAHQNEFKELLTTIISLSKKYIQKPNVELLLQQAFDQADKDIYQLSESFISLLKLTSFGAPGAFKFLGVEISQSSVRYKPNSQFLDTTLIHQSITGLYETRIDLSKLGED

SEQ ID NO: 182 - protein, 1371 aa, Streptococcus sp. F0441
MENKNYSIGLDIGTNSVGWSVITDDYKVPSKKMKVLGNTDKHFIKKNLIGALLFDEGTTAEARRLKRTARRRYTRRKNRLRYLQEIFSEEIGKVDSSFFHRLDDSFLIPEDKRGSKYPIFATLAEEKKYHKQFPTIYHLRKQLADSKEKTDLRLIYLALAHMIKYRGHFLYEEAFDIKNNDIQKIFNEFISIYNNTFEGNSLSGQNVQVEAIFTDKISKSAKRERVLKLFPDEKSTGLFSEFLKLIVGNQADFKKHFDLEEKAPLQFSRDTYDEDLENLLGQIGDDFADLFLVAKKLYDAILLSGILTVTNPSTKAPLSASMIERYENHQKDLASLKQFIKNNLPEKYDEVFSDQSEDGYAGYIDGKTTQETFYKYIKNLLSKFEGADYFLDKIEREDFLRKQRTFDNGSIPHQIHLQEMNAILRRQGEHYPFLKENKEKIEKILTFRIPYYVGPLARGNRDFAWLTRNSDQAIRPWNFEEIVDKASSAEDFINKMTNYDLYLPEEKVLPKHSLLYETFAVYNELTKVKFIAEGLRDYQFLDSGQKKQIVTQLFKEKRKVTEKDIIQFLHNVDGYDGIELKGIEKQFNASLSTYHDLLKIIKDKAFMDDAKNEAILENIVHTLTIFEDREMIKQRLAQYDSLFDEKVIKALTRRHYTGWGKLSAKLINGISDKQTGNTILDYLIDDGEINRNFMQLINDDGLSFKEIIQKAQVVGKTNDVKQVVQELPGSPAIKKGILQSIKIVDELVKVMGHAPESIVIEMARENQTTARGKKNSQQRYKRIEDSLKILASGLNSKILKEHPTDNIQLQNDRLFLYYLQNGKDMYTGEALDINQLSSCDIDHIIPQAFIKDDSLDNRVLTSSKDNRGKSDNVPSLEVVDKMKVFWQQLLDSKLISYRKFNNLTKAERGGLNELDKVGFIKRQLVETRQITKHVAQILDARFNKEVTEKDKKNRTVKIITLKSNLVSNFRKEFELYKVREINDYHHAHDAYLNAVVAKAILKKYPKLEPEFVYGDYQKYDLKRYISRSKDPKEIEKATEKYFFYSNLLNFFKEEVHYADGTIVKRENIEYSKDTGEIAWNKEKDFATIKKVLSLPQVNIVKKREVQTGGFSKESILPKGNSDKLIPRKTKDILWDTTKYGGFDSPVIAYSILLIADIEKGKAKKLKTVKTLVGITIMEKDAFEKNPIAFLENKGYHNVCKENILCLPKYSLFELENGRRRLLASAKELQKCNEIVLPVYLTTLLYHSKNVHKLDEPGHLEYIQKHRNEFKDLLNLVSEFSQKYVLADANLEKIKNLYADNEQADIEILANSFINLLTFTALGAPAAFKFFGKDVDRKRYTTVSEILNATLIHQSITGLYETRIDLSKLGED

SEQ ID NO: 183 - protein, 1361 aa, Streptococcus sp. FF10
MKKPYSIGLDIGTNSVGWSVVTDDYKVPAKKMKVLGNTDKEYIKKNLIGALLFDSGETAEATRMKRTARRRYTRRRNRILYLQDIFSPELNQVDESFLHRLDDSFLVAEDKRGERHVIFGNIADEVKYHKEFPTIYHLRKHLADSSEKADLRLVYLALAHIIKYRGHFLIDEPIDIRNMNSQNLFKEFLLAFDGIQVDCYLASKHTDISGIITAKISKSRKVEAVLEQFPDQKKNSFFGNMVSLVFGLMPNFKSNFELDEDAKLQFSRDSYDEDLENLLGIIGDEYADVFVAAKKVYDSILLSGILTTNNHSTKAPLSASMIDRYDEHNSDKKLLRDFIRTNIGKEVFKEVFYDTSKNGYAGYIDGKTNQEDFYKYLKNLLQKVDGGDYFIEKIEREDFLRKQRTFDNGSIPHQVHLDEMKAILRRQGEFYPFLKENAEKIQQILTFKIPYYVGPLARGNSRFAWASYNSNEKMTPWNFDNVIDKTSSAQAFIERMTNNDLYLPDQKVLPKHSLLYQKFAVYNELTKIKYVTETGEARLFDVFLKKEIFDGLFKKERKVTKKKILNFLDKNFDEFRITDIQGLDNETGNFNASYGTYHDLLKIIGDKEFMDSSDNVDVLEDIVLSLTLFEDREMIKQRLLKYEDIFSKKVIANLTRRHYTGWGRLSAKLINGIKDKHSRKTILDYLIDDGHSNRNFMQLINDDNLSFKDEIANSQVIGDGDDLHQVVQELAGSPAIKKGILQSLKIVDELVKVMGYNPEQIVVEMARENQTTARGRNNSQQRLGSLTKAIQDFGSDILKRYPVENNQLQNDQLYLYYLQNGKDMYTGDTLDIHNLSQYDIDHIIPQSFIKDNSLDNRVLTNSKSNRGKSDNVPSNEVVKRMKGFWLKQLDAKLISQRKFDNLTKAERGGLSAEDKAGFIKRQLVETRQITKHVARILDERFNRDFDKNDKRIRNVKIVTLKSNLVSNFRKEFGFYKVREINNFHHAHDAYLNAVVAKALLIRYPKLEPEFVYGEYPKYNSYRERKSATEKMFFYSNIMNMFKTTIKLADGRVVEKPVIEANEETGEIAWDKTKHFANVKKVLSYPQVSIVKKVEEQTGGFSKESILPKGGSDKLIARKTKNNYLSTQKYGGFDSPTVAYSIMFVADIEKGKSKRLKTVKEMIGITIMERSRFESNSVTFLEEKGYRNIRENTIIKFPKYSLFELENGRRRLLASAIELQKGNEMFLPQQFVNLLYHAQHANKEDSVIYLEKHRHELSELFHHIIGVSEKTILKPKVEMTLNEAFEKHFEFDEVSELAQSFISLLKFTAFGAPGGFKFLDADIKQSNLRYQTVTEVLSSTLIHQSVTGLYETRIDLSKLGGE

SEQ ID NO: 184 - protein, 1375 aa, Streptococcus sp. M334
MSNKSYSIGLDIGTNSVGWAVITDDYKVPSKKMKVLGNTDKHFIKKNLIGALLFDEGTTAEDRRLKRTARRRYTRRKNRLRYLQEIFSQEISKVDSSFFHRLDDFFLVPEDKRGSKYPIFATLVEEKEYHKKFPTIYHLRKHLADSKEKTDLRLIYLALAHMIKYRGHFLYEESFDIKNNDIQKIFSEFISIYDNTFEGKSLSGQNAQVEAIFTDKISKSTKRERVLKLFPDEKSTGLFSEFLKLIVGNQADFKKHFDLEEKAPLQFSKDTYDEDLENLLGQIGDDFADLFLVAKKLYDAILLSGILTVKDLSTKAPLSASMIERYENHQKDLAALKQFIQNNLQEKYDEVFSDQSKDGYAGYIDGKTTQEAFYKYIKNLLSKFEGADYFLDKIEREDFLKKQRTFDNGSIPHQIHLQEMNAIIRRQGEHYPFLQENKEKIEKILTFRIPYYVGPLARGNGDFAWLTRNSDQAIRPWNFEEIVDQASSAEDFINKMTNYDLYLPEEKVLPKHSLLYETFAVYNELTKVKFIAEGLTRYQFLDKKQKKDIFDTFFKAENKRKVTEKDIIHYLHNVDGYDGIELKGIEKQFNASLSTYHDLLKIIKDKAFMDDSKNEEILENIIHTLTIFEDREMIKQRLAQYDSLFDEKVIKALTRRHYTGWGKLSAKLINGIRDKKSGKTILDYLIDDGEINRNFMQLIHDDGLSFKEIIQKAQVFGKTNDVKQVVQELPGSPAIKKGILQSIKIVDELVKVMGHAPESIVIEMARENQTTARGKKNSQQRYKRIEDSLKNLASGLDSNILKENPTDNIQLQNDRLFLYYLQNGRDMYTGKPLEINQLSNYDIDHIIPQAFIKDDSLDNRVLTSSKDNRGKSDNVPSLEVVEKMKAFWQQLLDSKLISERKFNNLTKAERERGGLNELDKVGFIKRQLVETRQITKHVAQFLDARFNKEVTEKDKKNRNVKIITLKSNLVSNFRKEFGLYKVREINDYHHAHDAYLNAVLAKAILKKYPKLEPEFVYGDYQKYDLQRYISKSREPKEVEKATQKYFFYSNLLNFFKEEVHYADGTIVKRENIEYSKDTGEIAWNKEKDFATVKKVLSLPQVNIVKKTEVQTGGFSKESILPKGNSDKLIPRKTKEILWDTTKYGGFDSPVIAYSILLIADIEKGKAKKLKTVKTLVGITIMEKATFEKNPITFLENKGYHNVRKENILCLPKYSLFELESGRRRMLASAKELQKGNEIVLPVYLTTLLYHSKNVHKLDEPEHLEYIQKHRYEFKDLLNLVSEFSQKYVLADANLEKIKNLYADNEQADIEILANSFINLLTFTALGAPAAFKFLGKDVDRKRYTTVSEILNATLIHQSITGLYETRIDLSKLGED

SEQ ID NO: 185 - protein, 1371 aa, Streptococcus sp. taxon 056
MNNNNYSIGLDIGTNSVGWAVITDDYKVPSKKMRVLGNTDKRFIKKNLIGALLFDEGTTAEDRRLKRTARRRYTRRKNRLRYLQEIFAEEMSKVDSSFFHRLDDSFLVPEDKSGSKYPIFATLAEEKEYHKKFPTIYHLRKHLADSKEKADLRLIYLALAHITKYRGHFLYEEAFDIKNNDIQKIFNEFINIYDNTFEGSSLSGQNAQVEAIFTGKISKSVKREHVLKLFPDEKSTGLFSEFLKLIVGNQADFKKHFDLEEKASLQFSKDTYDEDLENLLGQIGDDFADLFLVAKKLYDAILLSGILTVTDPSTKAPLSASMIERYENHQEDLAALKQFIKNNLPEKYAEVFSDQSKDGYAGYIDGKTTQEAFYKYIKNLLSKFEGADYFLDKIEREDFLRKQRTFDNGSIPHQIHLQEMNAILRRQGEHYPLLKENKEKIEKILTFRIPYYVGPLARGNRDFAWLTRNSDQAIRPWNFEEIVDKASSAESFINKMTNYDLYLPEEKVLPKHSLLYETFAVYNELTKVKFIAEGLRDYQFFDSGQKKQIVNQLFKEKRKVTEKDIIHYLHNVDGYDGIELKGIEKQFNASLSTYHDLLKIIKDKEFMDNHKNQEILENIVHTLTIFEDREMIKQRLAQYDSIFDEKVIKALTRRHYTGWGKLSAKLINGICDKKTGKTILDYLIDDGYNNRNFMQLINDDGLSFKEIIQKAQVVGKTDDLTQVVRELSGSPAIKKGILQSIKIVDELVKIMGYAPESIVIEMARENQTTAKGKKNSQQRYKRIEDALKNLAPGLDSTISKENPTDNIQLQNDRLFLYYLQNGKDMYTGEALDINQLSSYDIDHIIPQAFIKDDSLDNRVLTSSKDNRGKSDNVPSLEVVKKRKAFWQQLLDSKLISERKFNNLTKAERGGLDERDKVGFIKRQLVETRQITKHVARILDARFNTEVSEKNQKIRSVKIITLKSNLVSNFRKEFKLYKVREINDYHHAHDAYLNAVVAKAILKKYPKLEPEFVYGDYQKYDLKRYISKSKDPKEVEKATEKYFFYSNLLNFFKEEVHYADGTIVKRENIEYSKDTGEIAWNKEKDFVTIKKVLSYPQVNIVKKREVQTGGFSKESILPKGNSDKLIPRKTKDILWDTTKYGGFDSPVIAYSILLIADIEKGKAKKLKTVKTLVGITIMEKAAFEKNPITFLENKGYHNVRKENILCLPKYSLFELENGRRRLLASAKELQKGNEIVLPVYLTTLLYHSKNVHKLDEPEHLEYIQKHRYEFKDLLNLVSEFSQKYVLAEANLEKIKSLYVDNEQADIEILANSFINLLTFTALGAPAAFKFFGKDVDRKRYTTVSEILNATLIHQSITGLYETRIDLSKLGED

SEQ ID NO: 186 - protein, 1364 aa, Streptococcus suis
MKKKYAIGIDIGTNSVGWSVVTDDYKVPSKKMKVFGNTEKRYIKKNLLGTLLFDEGNTAENRRLKRTARRRYTRRRNRILYLQEIFAEEINKIDDSFFQRLDDSFLIVEDKQGSKHPIFGTLQEEKKYHKQFPTIYHLRKQLADSSQKADIRLIYLALAHIIKYRGHFLFEGDLKSENKDVQHLFNDFVEMFDKTVEGSYLSENLPNVADVLVEKVSKSRRLENILHYFPNEKKNGLFGNFLALALGLQPNFKTNFELAEDAKIQFSKETYEEDLEELLGKIGDDYADLFIATKSLYDGILLAGILSTTDSTTKAPLSSSMVNRYEEHKKDLALLKNFIHQNLSDSYKEVFNDKLKDGYAGYIEGKTTQENFYRFIKKAIEKIEGSDYFIDKIDREDFLRKQRTFDNGSIPHQIHLQEMHAIIRRQAEFYPFLVENQDKIEKILTFRIPYYVGPLARGKSEFAWLNRKSDEKIRPWNFDEMVDKETSAENFITRMTNYDQYLPDQKVLPKHSLLYEKFAVYNELTKVKFIAEGMRDYQFLDSGQKKDIVKTLFKTKRKVTAKDIKAYLENSNGYAGVELKGLEEQFNASLPTYHDLLKILRDKAFIDAEENQEILEDIVLTLTLFEDREMIRKRLEKYKDILTEEQRKKLERRHYTGWGRLSAKLINGILDKVTRKTILGYLIDDGTSNRNFMQLINDDTLSFVDEIRLAQGSGEAEDYRAEVQNLAGSPAIKKGILQSLKIVDELIEVMGYDPEHIVVEMARENQFTNQGRRNSQQRYKKIENAIKNLDSNLNSKILKEYPTNNQALQNDRLFLYYLQNGKDMYTDEELDIDQLSQYDIDHIIPQAFIKDDSLDNKVLTKSAKNRGKSDDVPSLEIVHKKKNFWKQLLDSQLISQRKFDNLTKAERGGLTNEDKARFIQRQLVETRQITKHVARILDTRFNTKLDEAGNRIRDPKVNIITLKSNLVSQFRKDYQLYKVREINNYHHAHDAYLNAVVATALLKKYPQLAPEFVYGDYPKYNSYKSRKSATEKVLFYSNIMNFFRRVLVYSKTGEVRIRPVIEVNKETGEIVWDKKSDFRTVRKVLSYPQVNVVKKVEMQTGGFSKESILQHGDSDKLIPRKTEKFYLDTKKYGGFDSPTIAYSVLLIADIEKGKAKKLKRVKELIGITIMERMAFEKNPIEFLEHKGYKNILEKNIIKLPKYSLFELENGRRRLLASAKELQKGNEMILPPHLVTLLYHSSNIHKITEPIHLNYVNKNKHEFKELLRHISDFSTRYILAQDRLSKIEELYDKNDGDDISDLTSSFVNLLTFTAIGAPAAFKFLGSVIDRKRYTSIAEILEATLIHQSVTGLYETRIDLSKLGGD

SEQ ID NO: 187 - protein, 1366 aa, Streptococcus suis
MKKKYAIGIDIGTNSVGWSVVTDDYKVPSKKMKVFGNTEKRYIKKNLLGTLLFDEGNTAENRRLKRTARRRYTRRRNRILYLQEIFAEEINKIDDSFFQRLDDSFLIVEDKQGSKHPIFGTLQEEKEYHKQFPTIYHLRKQLADSSQKADIRLIYLALAHIIKYRGHFLFEGDLKSENKDVQHLFNDFVEMFDKTVEGSYLSENLPNVADVLVEKVSKSRRLENILHYFPNEKKNGLFGNFLTLALGLQPNFKTNFELAEDAKIQFSKETYEEDLEELLGKIGDDYADLFIATKSLYDGILLAGILSTTDSTTKAPLSSSMVNRYEEHQKDLALLKNFIHQNLSDSYKEVFNDKLKDGYAGYIEGKTTQENFYRFIKKAIEKIEGSNYFIDKIDREDFLRKQRTFDNGSIPHQIHLQEMHAIIRRQAEFYPFLVENQDKIEKILTFRIPYYVGPLARGKSEFAWLNRKSDEKIRPWNFDEMVDKETSAENFITRMTNYDQYLPDQKVLPKHSLLYEKFAVYNELTKVRYVTEQGKSFFFDANMKQEIFDGVFKVYRKVTKEKLMDFLGKEFDEFRIVDLLGLDKDNKSFNASLGTYHDLKKIVSKDLLDNPENEDILENVVLTLTLFEDREMIRKRLEKYKDVLTEEQRKKLERRHYTGWGRLSAKLINGIRDKVTRKTILDYLIDDGTSNRNFMQLINDDTLSFVDEIRLAQGSGEAEDYRAEVQNLAGSPAIKKGILQSLKIVDELIEVMGYDPEHIVVEMARENQFTNQGRRNSQQRYKKIENAIKNLDSNLNSKILKEYPTNNQALQNDRLFLYYLQNGKDMYTDEELDIDQLSQYDIDHIIPQAFIKDDSLDNKVLTKSAKNRGKSDDVPSLEIVHKKKNFWKQLLDSQLISQRKFDNLTKAERGGLTNEDKARFIQRQLVETRQITKHVARILDTRFNTKLDEAGNRIRDPKVNIITLKSNLVSQFRKDYQLYKVREINNYHHAHDAYLNAVVATALLKKYPQLAPEFVYGDYPKYNSYKSRKSATEKVLFYSNIMNFFRRVLVYSKTGEVRIRPVIEVNKETGEIVWDKKSDFRTVRKVLSYPQVNVVKKVEMQTGGFSKESILQHGDSDKLIPRKTEKFYLDTKKYGGFDSPTIAYSVLLIADIEKGKAKKLKRVKELIGITIMERMAFEKNPIEFLEHKGYKNILEKNIIKLPKYSLFELENGRRRLLASAKELQKGNEMILPPHLVTLLYHSSNIHKITEPIHLNYVNKNKHEFKELLRHISDFSTRYILAQDRLSKIEELYDKNDGDDISDLTSSFVNLLTFTAIGAPAAFKFLGSVIDRKRYTSIAEILEATLIHQSVTGLYETRIDLSKLGGD

SEQ ID NO: 188 - protein, 1366 aa, Streptococcus suis
MKKKYAIGIDIGTNSVGWSVVTDDYKVPSKKMKVFGNTEKRYIKKNLLGTLLFDEGNTAENRRLKRTARRRYTRRRNRILYLQEIFAEEINKIDDSFFQRLDDSFLIVEDKQGSKHPIFGTLQEEKEYHKQFPTIYHLRKQLADSSQKADIRLIYLALAHIIKYRGHFLFEGDLKSENKDVQHLFNDFVEMFDKTVEGSYLSENLPNVADVLVEKVSKSRRLENILHYFPNEKKNGLFGNFLALALGLQPNFKTNFELAEDAKIQFSKETYEEDLEELLGKIGDDYADLFIATKSLYDGILLAGILSTTDSTTKAPLSSSMVNRYEEHQKDLALLKNFIHQNLSDSYKEVFNDKLKDGYAGYIEGKTTQENFYRFIKKAIEKIEGSNYFIDKIDREDFLRKQRTFDNGSIPHQIHLQEMHAIIRRQAEFYPFLVENQDKIEKILTFRIPYYVGPLARGKSEFAWLNRKSDEKIRPWNFDEMVDKETSAENFITRMTNYDQYLPDQKVLPKHSLLYEKFAVYNELTKVRYVTEQGKSFFFDANMKQEIFDGVFKVYRKVTKEKLMDFLGKEFDEFRIVDLLGLDKDNKSFNASLGTYHDLKKIVSKDLLDNPENEDILENVVLTLTLFEDREMIRKRLEKYKDVLTEEQRKKLERRHYTGWGRLSAKLINGIRDKVTRKTILDYLIDDGTSNRNFMQLINDDTLSFVDEIRLAQGSGEAEDYRAEVQNLAGSPAIKKGILQSLKIVDELIEVMGYDPEHIVVEMARENQFTNQGRRNSQQRYKKIENAIKNLDSNLNSKILKEYPTNNQALQNDRLFLYYLQNGKDMYTDEELDIDQLSQYDIDHIIPQAFIKDDSLDNKVLTKSAKNRGKSDDVPSLEIVHKKKNFWKQLLDSQLISQRKFDNLTKAERGGLTNEDKARFIQRQLVETRQITKHVARILDTRFNTKLDEAGNRIRDPKVNIITLKSNLVSQFRKDYQLYKVREINNYHHAHDAYLNAVVATALLKKYPQLAPEFVYGDYPKYNSYKSRKSATEKVLFYSNIMNFFRRVLVYSKTGEVRIRPVIEVNKETGEIVWDKKSDFRTVRKVLSYPQVNVVKKVEMQTGGFSKESILQHGDSDKLIPRKTEKFYLDTKKYGGFDSPTIAYSVLLIADIEKGKAKKLKRVKELIGITIMERMAFEKNPIEFLEHKGYKNILEKNIIKLPKYSLFELENGRRRLLASAKELQKGNEMILPPHLVTLLYHSSNIHKITEPIHLNYVNKNKHEFKELLRHISDFSTRYILAQDRLSKIEELYDKNDGDDISDLTSSFVNLLTFTAIGAPAAFKFLGSVIDRKRYTSIAEILEATLIHQSVTGLYETRIDLSKLGGD

SEQ ID NO: 189 - protein, 1364 aa, Streptococcus suis
MKKKYAIGIDIGTNSVGWSVVTDDYKVPSKKMKVFGNTEKRYIKKNLLGTLLFDEGNTAENRRLKRTARRRYTRRRNRILYLQEIFAEEINKIDDSFFQRLDDSFLIVEDKQGSKHPIFGTLQEEKKYHKQFPTIYHLRKQLADSSQKADIRLIYLALAHIIKYRGHFLFEGDLKSENKDVQHLFNDFVEMFDKTVEGSYLSENLPNVADVLVEKVSKSRRLENILHYFPNEKKNGLFGNFLALALGLQPNFKTNFELAEDAKIQFSKETYEEDLEELLGKIGDDYADLFIATKSLYDGILLAGILSTTDSTTKAPLSSSMVNRYEEHKKDLALLKNFIHQNLSDSYKEVFNDKLKDGYAGYIEGKTTQENFYRFIKKAIEKIEGSDYFIDKIDREDFLRKQRTFDNGSIPHQIHLQEMHAIIRRQAEFYPFLVENQDKIEKILTFRIPYYVGPLARGKSEFAWLNRKSDEKIRPWNFDEMVDKETSAENFITRMTNYDQYLPDQKVLPKHSLLYEKFAVYNELTKVKFIAEGMRDYQFLDSGQKKDIVKTLFKTKRKVTAKDIKAYLENSNGYAGVELKGLEEQFNASLPTYHDLLKILRDKAFIDAEENQEILEDIVLTLTLFEDREMIRKRLEKYKDILTEEQRKKLERRHYTGWGRLSAKLINGILDKVTRKTILGYLIDDGTSNRNFMQLINDDTLSFVDEIRLAQGSGEAEDYRAEVQNLAGSPAIKKGILQSLKIVDELIEVMGYDPEHIVVEMARENQFTNQGRRNSQQRYKKIENAIKNLDSNLNSKILKEYPTNNQALQNDRLFLYYLQNGKDMYTDEELDIDQLSQYDIDHIIPQAFIKDDSLDNKVLTKSAKNRGKSDDVPSLEIVHKKKNFWKQLLDSQLISQRKFDNLTKAERGGLTNEDKARFIQRQLVETRQITKHVARILDTRFNTKLDEAGNRIRDPKVNIITLKSNLVSQFRKDYQLYKVREINNYHHAHDAYLNAVVATALLKKYPQLAPEFVYGDYPKYNSYKSRKSATEKVLFYSNIMNFFRRVLVYSKTGEVRIRPVIEVNKETGEIVWDKKSDFKTVRKVLSYPQVNVVKKVEMQTGGFSKESILQHGDSDKLIPRKTEKFYLDTKKYGGFDSPTIAYSVLLIADIEKGKAKKLKRVKELIGITIMERMAFEKNPIEFLEHKGYKNILEKNIIKLPKYSLFELENGRRRLLASAKELQKGNEMILPPHLVTLLYHSSNIHKITEPIHLNYVNKNKHEFKELLRHISDFSTRYILAQDRLSKIEELYDKNDGDDISDLTSSFVNLLTFTAIGAPAAFKFLGSVIDRKRYTSIAEILEATLIHQSVTGLYETRIDLSKLGGD

SEQ ID NO: 190 - protein, 1386 aa, Streptococcus suis
MDQKYSIGLDIGTNSVGWAVVTDDYKVPAKKMKVLGNTDKQSIKKNLLGALLFDSGETAEATRLKRTARRRYTRRRNRLRYLQEIFAEEMNKVDENFFQRLDDSFLVDEDKRGERHPIFGNIAAEVKYHDDFPTIYHLRKHLADISQKADLRLVYLALAHMIKFRGHFLIEGQLKAENTNVQALFKDFVEVYDKTVEESHLSEMTVDALSILTEKVSKSRRLENLIAHYPAEKKNTLFGNLIALSLGLQPNFKTNFQLSEDAKLQFSKDTYEEDLEGLLGEIGDEYADLFASAKNLYDAILLSGILTVDDNSTKAPLSASMVKRYEEHQKDLKKLKDFIKVNAPDQYNAIFKDKNKKGYAGYIENGVKQDEFYKYLKGILLQINGSGDFLDKIDREDFLRKQRTFDNGSIPHQIHLQEMHAILRRQEEHYPFLKENQDKIEKILTFRIPYYVGPLARKGSRFAWAEYKADEKITPWNFDDILDKEKSAEKFITRMTLNDLYLPEEKVLPKHSLLYETFTVYNELTKVKYVNEQGEAKFFDANMKQEIFDHVFKENRKVTKDKLLNYLGKEFDEFRIVDLTGLDKENKVFNSSLGTYHDLRKILDKSFLDNKENEQIIEDIIQTLTLFEDREMIRQRLQKYSDIFTKAQLKKLERCHYTGWGRLSYKLINGIRNKENKKTILDYLIDDGYANRNFMQLINDDALSFKEEIAKAQVIGETDDLNQVVSDIAGSPAIKKGILQSLKIVDELVKVMGYNPANIVIEMARENQTTDKGRRNSQQRLKLLQDSLKNLDNPVNIKNVENQQLQNDRLFLYYIQNGKDMYTGETLDINNLSQYDIDHIIPQAFIKDDSFDNRVLTSSSENRGKSDNVPSIEVVRARKADWMRLRKAGLISQRKFDNLTKAERGGLTENDKAGFIKRQLVETRQITKHVAQVLDARFNAKHDENKKVIRDVKIITLKSNLVSQFRKDFKFYKVREINDYHHAHDAYLNAVIGTALLKKYPKLASEFVYGEFKKYDVRKFIAKSDKEIGKATAKYFFYSNLMNFFKKEVKFADGTVVERPDIETSEDGEIAWNKQTDFKIVRKVLSYPQVNIVKKTEVQTHGLDRGKPRGLFNANPSPKPKPDSSENLVGVKRNLDPKKYGGYAGISNSYAVLVKAIIEKGVKKKETMVLEFQGISILDRITFEKDKRAFLLGKGYKDIKKIIELPKYSLFELKDGSRRMLASILSTNNKRGEIHKGNELFVPQKFTTLLYHAKRINNPINKDHIEYVKKHRDDFKELLNYVLEFNEKYVGATKNGERLKEAVADFDSKSNEEICTSFLGAVNSKNAGLFELTSLGSASDFEFLGVKIPRYRDYTPSSLLKDSTLIHQSITGLYETRIDLSKLGED

SEQ ID NO: 191 - protein, 1300 aa, Brochothrix thermosphacta
MWGVSLFEAGKTAAERRGYRSTRRRLNHRKFRLRLLEDMFEKEILSKDPSFFIRLKEAFLSPKDEQKQFKGNILFNDKDYTDADYYEQYKTIYHLRYDLISQHRQFDIREVYLAIHHLIKYRGHFIYEDQTFTTDGNQLQHHIKAIITMINSTLNRIIIPETIDINVFEKILLDRMMNRSSKVKFLIELTGEDKQDKPLLKELFNLIVGLKAKPASIFEQENLATIVETMNMSTEQVQLDLLTLADVLADEEYDLLLTAQKIYSAIILDESMDGYEYFAEAKKESYRKHQEELVLVKKMLKSNAITNDERAKFEYFYTDYIGAKSSNYEESKNIKKGLSAAYGKYSKEERLFKHIELLLAKENVLTTVEHALLEKNITFASLLPLQRSSRNAVIPYQVHEKELVAILENQATYYPFLLEQKDNIHKLLTFRIPYYVGPLADQKDSEFAWMVRKQAGKITPFNFEEMVDIDASSEAFIKRMTNKCTYLIHEDVIPKHSFSYAKFEVLNELNKIRLDGKPIDIPLKKRIFEGLFLEKTKVTQTSLKKWLAEHEHMTVSVVQGTQKETEFATSLQAFHRFVKIFDRETVSNPANEEMFEKIIYWSTVFEDKKIMRRKLSEYPQLTEQQQVQLAQVRFRGWGRLSQRLINRIKTPVSGDEDHKLSINEILWQTNENFMQIIRNKDYLFKKIIEEQFENETALLNKQRIDELAASPANKKGIWQAIKIVKELEKVLQQPAENIFIEFARSDEESKRSTPRDKFIEKAYAQLKKETDTFNLEHLKELKQRSKQLSSQRLFLYFIQNGKCMYSGEHLDIERLDSYEVDHILPQSYIKDNSIENLALVKKVENQRKKDSLLLNSSIINQNYSRWEQLKNAGLIGEKKFRNLTRTKITDRDKEGFIARQLVETRQITKHVTQLLQQEYKDTTKVFAIKATLVSGLRRKFEFIKNRNVNDYHHAQDAFLVAFLGTNITSNYPKIEMEYLFKGYQHYLNEVGKSAAKPKFTFIVENLSKQQYNSTTGEVKWNPEVDIAKLKRILNFKQCNIVRKVEEQSGALFKETIYPVEESSSKTIPLKKHLDTAIYGGYTAVNYASYALIQFKKGRKLKREIIGIPLAVQTRIDNSETSLQAYIAEQIKSEVEILNGRILKYQLISNNGNRLYIAGPSERHNARQLIVSDEAAKVIWLISTKQADEAMFLKYYRLEHLEAVFEELIRKQAADYQIFEKLIKKIEVNKVYFYSCTYNEKVKVIEELLKITQANATNGDLKLLKMSNREGRLGSVSVALDFKIINQSVTGLYQSIEDYNN

SEQ ID NO: 192 - protein, 1329 aa, Catenibacterium mitsuokai
IVDYCIGLDLGTGSVGWAVVDMNHRLMKRNGKHLWGSRLFSNAETAANRRASRSIRRRYNKRRERIRLLRAILQDMVLEKDPTFFIRLEHTSFLDEEDKAKYLGTDYKDNYNLFIDEDFNDYTYYHKYPTIYHLRKALCESTEKADPRLIYLALHHIVKYRGNFLYEGQKFNMDASNIEDKLSDIFTQFTSFNNIPYEDDEKKNLEILEILKKPLSKKAKVDEVMTLIAPEKDYKSAFKELVTGIAGNKMNVTKMILCEPIKQGDSEIKLKFSDSNYDDQFSEVEKDLGEYVEFVDALHNVYSWVELQTIMGATHTDNASISEAMVSRYNKHHDDLKLLKDCIKNNVPNKYFDMFRNDSEKSKGYYNYINRPSKAPVDEFYKYVKKCIEKVDTPEAKQILNDIELENFLLKQNSRTNGSVPYQMQLDEMIKIIDNQAEYYPILKEKREQLLSILTFRIPYYFGPLNETSEHAWIKRLEGKENQRILPWNYQDIVDVDATAEGFIKRMRSYCTYFPDEEVLPKNSLIVSKYEVYNELNKIRVDDKLLEVDVKNDIYNELFMKNKTVTEKKLKNWLVNNQCCSKDAEIKGFQKENQFSTSLTPWIDFTNIFGKIDQSNFDLIENIIYDLTVFEDKKIMKRRLKKKYALPDDKVKQILKLKYKDWSRLSKKLLDGIVADNRFGSSVTVLDVLEMSRLNLMEIINDKDLGYAQMIEEATSCPEDGKFTYEEVERLAGSPALKRGIWQSLQIVEEITKVMKCRPKYIYIEFERSEEAKERTESKIKKLENVYKDLDEQTKKEYKSVLEELKGFDNTKKISSDSLFLYFTQLGKCMYSGKKLDIDSLDKYQIDHIVPQSLVKDDSFDNRVLVVPSENQRKLDDLVVPFDIRDKMYRFWKLLFDHELISPKKFYSLIKTEYTERDEERFINRQLVETRQITKNVTQIIEDHYSTTKVAAIRANLSHEFRVKNHIYKNRDINDYHHAHDAYIVALIGGFMRDRYPNMHDSKAVYSEYMKMFRKNKNDQKRWKDGFVINSMNYPYEVDGKLIWNPDLINEIKKCFYYKDCYCTTKLDQKSGQLFNLTVLSNDAHADKGVTKAVVPVNKNRSDVHKYGGFSGLQYTIVAIEGQKKKGKKTELVKKISGVPLHLKAASINEKINYIEEKEGLSDVRIIKDNIPVNQMIEMDGGEYLLTSPTEYVNARQLVLNEKQCALIADIYNAIYKQDYDNLDDILMIQLYIELTNKMKVLYPAYRGIAEKFESMNENYVVISKEEKANIIKQMLIVMHRGPQNGNIVYDDFKISDRIGRLKTKNHNLNNIVFISQSPTGIYTKKYKL

SEQ ID NO: 193 - protein, 1389 aa, Cloning vector pYB196
MDKKYSIGLDIGTNSVGWAVITDEYKVPSKKFKVLGNTDRHSIKKNLIGALLFDSGETAEATRLKRTARRRYTRRKNRICYLQEIFSNEMAKVDDSFFHRLEESFLVEEDKKHERHPIFGNIVDEVAYHEKYPTIYHLRKKLVDSTDKADLRLIYLALAHMIKFRGHFLIEGDLNPDNSDVDKLFIQLVQTYNQLFEENPINASGVDAKAILSARLSKSRRLENLIAQLPGEKKNGLFGNLIALSLGLTPNFKSNFDLAEDAKLQLSKDTYDDDLDNLLAQIGDQYADLFLAAKNLSDAILLSDILRVNTEITKAPLSASMIKRYDEHHQDLTLLKALVRQQLPEKYKEIFFDQSKNGYAGYIDGGASQEEFYKFIKPILEKMDGTEELLVKLNREDLLRKQRTFDNGSIPHQIHLGELHAILRRQEDFYPFLKDNREKIEKILTFRIPYYVGPLARGNSRFAWMTRKSEETITPWNFEEVVDKGASAQSFIERMTNFDKNLPNEKVLPKHSLLYEYFTVYNELTKVKYVTEGMRKPAFLSGEQKKAIVDLLFKTNRKVTVKQLKEDYFKKIECFDSVEISGVEDRFNASLGTYHDLLKIIKDKDFLDNEENEDILEDIVLTLTLFEDREMIEERLKTYAHLFDDKVMKQLKRRRYTGWGRLSRKLINGIRDKQSGKTILDFLKSDGFANRNFMQLIHDDSLTFKEDIQKAQVSGQGDSLHEHIANLAGSPAIKKGILQTVKVVDELVKVMGRHKPENIVIEMARENQTTQKGQKNSRERMKRIEEGIKELGSQILKEHPVENTQLQNEKLYLYYLQNGRDMYVDQELDINRLSDYDVDHIVPQSFLKDDSIDNKVLTRSDKNRGKSDNVPSEEVVKKMKNYWRQLLNAKLITQRKFDNLTKAERGGLSELDKAGFIKRQLVETRQITKHVAQILDSRMNTKYDENDKLIREVKVITLKSKLVSDFRKDFQFYKVREINNYHHAHDAYLNAVVGTALIKKYPKLESEFVYGDYKVYDVRKMIAKSEQEIGKATAKYFFYSNIMNFFKTEITLANGEIRKRPLIETNGETGEIVWDKGRDFATVRKVLSMPQVNIVKKTEVQTGGFSKESILPKRNSDKLIARKKDWDPKKYGGFDSPTVAYSVLVVAKVEKGKSKKLKSVKELLGITIMERSSFEKNPIDFLEAKGYKEVKKDLIIKLPKYSLFELENGRKRMLASAGELQKGNELALPSKYVNFLYLASHYEKLKGSPEDNEQKQLFVEQHKHYLDEIIEQISEFSKRVILADANLDKVLSAYNKHRDKPIREQAENIIHLFTLTNLGAPAAFKYFDTTIDRKRYTSTKEVLDATLIHQSITGLYETRIDLSQLGGDGGSGPPKKKRKVYPYDVPDYA

SEQ ID NO: 194 - protein, 1335 aa, Clostridiales bacterium S5-A11
MKNYTIGLDIGTNSVGWAVIKDDLTLVRKKIKISGNTDKKEVKKNLWGSFLFEQGDTAQDTRVKRIARRRYERRRFRIRELQKIFDKSMGEVDSNFFHRLDESFLVEEDKEYSKYPIFSNEKEDKNYYDKYPTIYHLRKDLADSNQKADLRLIYLALAHMIKYRGHFLIEGDLKMDGISISESFQEFIDSYNEVCALEDENLEIIYNDELLTQIENIFKQDISRSKKLDQAIALFQGVKRQSLFGIFLTLIVGNKANFQKIFNLEDDIKLDLKEEDYDENLEELLSNIDEGYRDVFLQAKNVYNAIELSKILKTDGKETKAPLSAQMVELYNQHREDLKKYKDYIKAYLPEKYGETFKDATKNGYAGYIDGKTSQEDFYKFVKAQLKGEENGEYFLEAIENENFLRKQRSFYNGVIPYQIHLQELTAVLDQQEKHYSFLKENRDKIISLLTFRIPYYVGPLAKGESRFAWLERSNSEEKIKPWNFDKIVDIDKSAELFIENLTSRDTYLPDEPVLPKRSLIYQKFTIFNELTKISYIDERGILQNFSSREKIAIFNDLFKNKSKVTKNQLVKYIENKEQIIAPEIKGIEDSFNSNYSTYIDLSKIPDMKKLLEKDEDEILEEIIKILTIFEDRKMRKRQLMKFKDKLSEKAINQLSKKHYTGWGQLSEKLINGIRDEQSNKTILDYLIEDNGCPKNMNRNFMQLINDDTLSFKEKIRKAQDINQVNDIKEIVKDLPGSPAIKKGIYQSIRIVDEIIRKMKDRPKNIVIEMARENQTTQEGKNKSKARLKKIQEGLENLDSVHVEKQALDEEMLKSPKYYLYCLQNGKDIYTGKDLDIGQLQTYDIDHIIPRSFITDNSFDNLVLTSSTVNRGKLDNVPSPDIVRQQKGFWKQLLRAGLMSQRKFNNLTKGKLTDRDRQQFINRQLVETRQITKHVANLLSHHLNEKKEVGEINIVLLKSALTSQFRKKFDFYKVREVNDYHHAHDAYLNGVIALKLLELYPYMAKDLIYGKYSYHRKIEGDKATQAKYKMSNIIERFSQDLLANPDGEIAWEKDKDLNTIRKVLSSKQINIIKKAEEGKGRLFKETINSRPSKKTEKRIPIKNNLDPNIYGGYIEEKMAYYIAINYLENGKTKKAIVGISIKDKKDFEGQTTEYLGKIGFNKASIINSFKNYTLFELENGSRRMIVGASKENDSKGELQKGNQMYLPQNLLEFVYHLKHYNEDETSHKFIVEHKAYFDELLNYIVEFANKYLELENSIEKIKDLYHGKGPDVEEKELVESFINLLAITKCGPAADITFLGEKISRKRYRSTNCLWGSEVIFQSPTGLYETRLRLE

SEQ ID NO: 195 - protein, 1384 aa, CRISPR-mediated gene targeting vector p(bhsp68-Cas9)
MDKKYSIGLDIGTNSVGWAVITDEYKVPSKKFKVLGNTDRHSIKKNLIGALLFDSGETAEATRLKRTARRRYTRRKNRICYLQEIFSNEMAKVDDSFFHRLEESFLVEEDKKHERHPIFGNIVDEVAYHEKYPTIYHLRKKLVDSTDKADLRLIYLALAHMIKFRGHFLIEGDLNPDNSDVDKLFIQLVQTYNQLFEENPINASGVDAKAILSARLSKSRRLENLIAQLPGEKKNGLFGNLIALSLGLTPNFKSNFDLAEDAKLQLSKDTYDDDLDNLLAQIGDQYADLFLAAKNLSDAILLSDILRVNTEITKAPLSASMIKRYDEHHQDLTLLKALVRQQLPEKYKEIFFDQSKNGYAGYIDGGASQEEFYKFIKPILEKMDGTEELLVKLNREDLLRKQRTFDNGSIPHQIHLGELHAILRRQEDFYPFLKDNREKIEKILTFRIPYYVGPLARGNSRFAWMTRKSEETITPWNFEEVVDKGASAQSFIERMTNFDKNLPNEKVLPKHSLLYEYFTVYNELTKVKYVTEGMRKPAFLSGEQKKAIVDLLFKTNRKVTVKQLKEDYFKKIECFDSVEISGVEDRFNASLGTYHDLLKIIKDKDFLDNEENEDILEDIVLTLTLFEDREMIEERLKTYAHLFDDKVMKQLKRRRYTGWGRLSRKLINGIRDKQSGKTILDFLKSDGFANRNFMQLIHDDSLTFKEDIQKAQVSGQGDSLHEHIANLAGSPAIKKGILQTVKVVDELVKVMGRHKPENIVIEMARENQTTQKGQKNSRERMKRIEEGIKELGSQILKEHPVENTQLQNEKLYLYYLQNGRDMYVDQELDINRLSDYDVDHIVPQSFLKDDSIDNKVLTRSDKNRGKSDNVPSEEVVKKMKNYWRQLLNAKLITQRKFDNLTKAERGGLSELDKAGFIKRQLVETRQITKHVAQILDSRMNTKYDENDKLIREVKVITLKSKLVSDFRKDFQFYKVREINNYHHAHDAYLNAVVGTALIKKYPKLESEFVYGDYKVYDVRKMIAKSEQEIGKATAKYFFYSNIMNFFKTEITLANGEIRKRPLIETNGETGEIVWDKGRDFATVRKVLSMPQVNIVKKTEVQTGGFSKESILPKRNSDKLIARKKDWDPKKYGGFDSPTVAYSVLVVAKVEKGKSKKLKSVKELLGITIMERSSFEKNPIDFLEAKGYKEVKKDLIIKLPKYSLFELENGRKRMLASAGELQKGNELALPSKYVNFLYLASHYEKLKGSPEDNEQKQLFVEQHKHYLDEIIEQISEFSKRVILADANLDKVLSAYNKHRDKPIREQAENIIHLFTLTNLGAPAAFKYFDTTIDRKRYTSTKEVLDATLIHQSITGLYETRIDLSQLGGDGSPKKKRKVSSGGAAG

SEQ ID NO: 196 - protein, 1332 aa, Dolosigranulum pigrum
MQKNYTIGLDIGTNSVGWAVMKDDYTLIRKRMKVLGNTDIKKIKKNFWGVRLFDEGETAKETRLKRGTRRRYQRRRNRLIYLQDIFQQPMLAIDENFFHRLDDSFFVPDDKSYDRHPIFGSLEEEVAYHNTYPTIYHLRKHLADNPEKADLRLVYTALAHIVKYRGHFLIEGELNTENTSISETFEQFLDTYSDIFKEQLVGDISKVEEILSSKQSRSRKHEQIMALFPNENKLGNFGRFMMLIVGNTSNFKPVFDLDDEYKLKLSDETYEEDLDTLLGMTDDVFLDVFMAAKNVYDAVEMSAIISTDTGNSKAVLSNQMINFYDEHKVDLAQLKQFFKTHLPDKYYECFSDPSKNGYAGYIDGKTNQEDFYKYIEKVMKTIKSDKKDYFLDKIDREVFLRKQRSFYNSVIPHQIHLQEMQAILDRQSQYYPFLAENRDKIESLVTFRIPYYVGPLTVSDQSEFAWMERQSDEPIRPWNFDEIVNKERSAEKFIERMTNMDTYLLEEKVLPKRSLLYQTFEVYNELTKVRYTNEQGKTEKLNRQQKAEIIETLFKQKNRVREKDIANYLEQYGYVDGTDIKGVEDKFNASLSTYNDLAKIDGAKAYLDDPEYADVWEDIIKILTIFEDKAMRKKQLQTYSDTLSPEILKKLERKHYTGWGRFSKKLINGLRDEGSNKTILDYLKSDEGSSGPTNRNFMQLIRDNTLSFKKKIEDAQTIEDTTHIYDTVAELPGSPAIKKGIRQALKIVEEIIDIIGYEPENIVVEMARESQTTKKGKDLSKERLEKLTEAIKEFDGPSDVKVKDLKNENLRNDRLYLYYLQNGRDMYTNEPLDINNLSKYDIDHIIPQSFTTDNSIDNKVLVSRTKNQGNKSDDVPSINIVHKMKPFWRQLHKAGLISDRKFKNLTKAEHGGLTEADRAHFLNRQLVETRQITKHVANLLDSQYNTAEEQRINIVLLKSSMTSRFRKEFKLYKVREINDYHHGHDAYLNAVVATTIMKVYPNLKPQFVYGQYKKTSMFKEEKATARKHFYSNITKFFKKEKVVNEETGEILWDTERHLSTIKRVLSWKQMNIVKKVEKQKGQLWKETIYPKGDSSKLIPVKEGMDPQKYGGLSQVSEAFAVVITHEKGKKKQLKSDLISIPIVDQKAYEQHPTAYLEEAGYNNPTVLHELFKYQLFELEDGSRRMIASAKEFQKGNQMVLPLELVELLYHANRYDKVKFPDSIEYVHDNLAKFDDLLEYVIDFSNKYINADKNVQKIQKIYKEHGTEDVELTVESFVNLMTFTAMGAPATFKFYGESITRSRYTSITEFRGSTLIFQSITGLYETRYKLEDN

SEQ ID NO: 197 - protein, 1337 aa, Enterococcus
MKKDYVIGLDIGTNSVGWAVMTEDYQLVKKKMPIYGNTEKKKIKKNFWGVRLFEEGHTAEDRRLKRTARRRISRRRNRLRYLQAFFEEAMTDLDENFFARLQESFLVPEDKKWHRHPIFAKLEDEVAYHETYPTIYHLRKKLADSSEQADLRLIYLALAHIVKYRGHFLIEGKLSTENISVKEQFQQFMIIYNQTFVNGESRLVSAPLPESVLIEEELTEKASRTKKSEKVLQQFPQEKANGLFGQFLKLMVGNKADFKKVFGLEEEAKITYASESYEEDLEGILAKVGDEYSDVFLAAKNVYDAVELSTILADSDKKSHAKLSSSMIVRFTEHQEDLKKFKRFIRENCPDEYDNLFKNEQKDGYAGYIAHAGKVSQLKFYQYVKKIIQDIAGAEYFLEKIAQENFLRKQRTFDNGVIPHQIHLAELQAIIHRQAAYYPFLKENQEKIEQLVTFRIPYYVGPLSKGDASTFAWLKRQSEEPIRPWNLQETVDLDQSATAFIERMTNFDTYLPSEKVLPKHSLLYEKFMVFNELTKISYTDDRGIKANFSGKEKEKIFDYLFKTRRKVKKKDIIQFYRNEYNTEIVTLSGLEEDQFNASFSTYQDLLKCGLTRAELDHPDNAEKLEDIIKILTIFEDRQRIRTQLSTFKGQFSAEVLKKLERKHYTGWGRLSKKLINGIYDKESGKTILGYLIKDDGVSKHYNRNFMQLINDSQLSFKNAIQKAQSSEHEETLSETVNELAGSPAIKKGIYQSLKIVDELVAIMGYAPKRIVVEMARENQTTSTGKRRSIQRLKIVEKAMAEIGSNLLKEQPTTNEQLRDTRLFLYYMQNGKDMYTGDELSLHRLSHYDIDHIIPQSFMKDDSLDNLVLVGSTENRGKSDDVPSKEVVKDMKAYWEKLYAAGLISQRKFQRLTKGEQGGLTLEDKAHFIQRQLVETRQITKNVAGILDQRYNANSKEKKVQIITLKASLTSQFRSIFGLYKVREVNDYHHGQDAYLNCVVATTLLKVYPNLAPEFVYGEYPKFQTFKENKATAKAIIYTNLLRFFTEDEPRFTKDGEILWSNSYLKTIKKELNYHQMNIVKKVEVQKGGFSKESIKPKGPSNKLIPVKNGLDPQKYGGFDSPIVAYTVLFTHEKGKKPLIKQEILGITIMEKTRFEQNPILFLEEKGFLRPRVLMKLPKYTLYEFPEGRRRLLASAKEAQKGNQMVLPEHLLTLLYHAKQCLLPNQSESLAYVEQHQPEFQEILERVVDFAEVHTLAKSKVQQIVKLFEANQTADVKEIAASFIQLMQFNAMGAPSTFKFFQKDIERARYTSIKEIFDATIIYQSTTGLYETRRKVVD

SEQ ID NO: 198 - protein, 1288 aa, Enterococcus
MRLFEEGHTAEDRRLKRTARRRISRRRNRLRYLQAFFEEAMTDLDENFFARLQESFLVPEDKKWHRHPIFAKLEDEVAYHETYPTIYHLRKKLADSSEQADLRLIYLALAHIVKYRGHFLIEGKLSTENTSVKDQFQQFMVIYNQTFVNGESRLVSAPLPESVLIEEELTEKASRTKKSEKVLQQFPQEKANGLFGQFLKLMVGNKADFKKVFGLEEEAKITYASESYEEDLEGILAKVGDEYSDVFLAAKNVYDAVELSTILADSDKKSHAKLSSSMIVRFTEHQEDLKKFKRFIRENCPDEYDNLFKNEQKDGYAGYIAHAGKVSQLKFYQYVKKIIQDIAGAEYFLEKIAQENFLRKQRTFDNGVIPHQIHLAELQAIIHRQAAYYPFLKENQEKIEQLVTFRIPYYVGPLSKGDASTFAWLKRQSEEPIRPWNLQETVDLDQSATAFIERMTNFDTYLPSEKVLPKHSLLYEKFMVFNELTKISYTDDRGIKANFSGKEKEKIFDYLFKTRRKVKKKDIIQFYRNEYNTEIVTLSGLEEDQFNASFSTYQDLLKCGLTRAELDHPDNAEKLEDIIKILTIFEDRQRIRTQLSTFKGQFSAEVLKKLERKHYTGWGRLSKKLINGIYDKESGKTILDYLVKDDGVSKHYNRNFMQLINDSQLSFKNAIQKAQSSEHEETLSETVNELAGSPAIKKGIYQSLKIVDELVAIMGYAPKRIVVEMARENQTTSTGKRRSIQRLKIVEKAMAEIGSNLLKEQPTTNEQLRDTRLFLYYMQNGKDMYTGDELSLHRLSHYDIDHIIPQSFMKDDSLDNLVLVGSTENRGKSDDVPSKEVVKDMKAYWEKLYAAGLISQRKFQRLTKGEQGGLTLEDKAHFIQRQLVETRQITKNVAGILDQRYNAKSKEKKVQIITLKASLTSQFRSIFGLYKVREVNDYHHGQDAYLNCVVATTLLKVYPNLAPEFVYGEYPKFQTFKENKATAKAIIYTNLLRFFTEDEPRFTKDGEILWSNSYLKTIKKELNYHQMNIVKKVEVQKGGFSKESIKPKGPSNKLIPVKNGLDPQKYGGFDSPVVAYTVLFTHEKGKKPLIKQEILGITIMEKTRFEQNPILFLEEKGFLRPRVLMKLPKYTLYEFPEGRRRLLASAKEAQKGNQMVLPEHLLTLLYHAKQCLLPNQSESLAYVEQHQPEFQEILERVVDFAEVHTLAKSKVQQIVKLFEANQTADVKEIAASFIQLMQFNAMGAPSTFKFFQKDIERARYTSIKEIFDATIIYQSPTGLYETRRKVVD

SEQ ID NO: 199 - protein, 1079 aa, Enterococcus durans IPLA 655
MDEEAKIQLSKESYEEELESLLEKSGEEFRDVFLQAKKVYDAILLSDILSTKKQNSKAKLSLGMIERYDSHKKDLEELKQFVKANLPEKTAIFFKDSSKNGYAGYIDGKTTQEDFYKFLKKELNGIAGSERFMEKVDQENFLLKQRTTANGVIPHQVHLTELKAIIERQKPYYPSLEEARDKMIRLLTFRIPYYVGPLAQGEETSSFAWLERKTPEKVTPWNATEVIDYSASAMKFIQRMINYDTYLPTEKVLPKHSILYQKYTIFNELTKVAYKDERGIKHQFSSKEKREIFKELFQKQRKVTVKKLQQFLSANYNIEDAEILGVDKAFNSSYATYHDFLDLAKPNTERVAELLEQPEMNAMFEDIVKILTIFEDREMIRTQLKKYQSVLGDGFFKKLVKKHYTGWGRLSERLINGIRDKKTNKTILDYLIDDDDFPYNRNRNFMQLINDDSLSFKEELANELALAGNQSLLEVVEALLGSPAIKKGIWQTLKIVEELIEIIGYNPKNIVVEMARENQRTNRSKPRLKALEEALKSFDSPLLKEQPVDNQALQKDRLYLYYLQNGKDMYTGEALDIDRLSEYDIDHIIPRSFIVDNSIDNKVLVSSKENRLKMDDVPDQKVVIRMRRYWEKLLRANLISERKFAYLTKLELTPEDKARFIQRQLVETRQITKHVAAILDQYFNQPEESKNKGIRIITLKSSLVSQFRKTFGINKVREINNHHHAHDAYLNGVVAIALLKKYPKLEPEFVYGNYTKFNLATENKATAKKEFYSNILRFFEKEEYSYDENGEIFWDKARHIPQIKKVISSHQVNIVKKVEVQTGGFYKETVNPKGKPDKLIQRKAGWDVSKYGGFGSPVVAYAVAFIYEKGKARKKAKAIEGITIMKQSLFEQDPIGFLSNKGYSNVTKFIKLSKYTLYELENGRRRMVASHKEAQKANSFILPEKLVTLLYHAQHYDEIAHKESFDYVNDHLSEFREILDQVIDFSNRYTIAAKNTEKIAELFEQNQESTVQSLSQSFINLMQLNAMGAPADFKFFDVIIPRKRYPSLTEIWESTIIYQSITGLRETRTRMATLWDGEQ

SEQ ID NO: 200 - protein, 1337 aa, Enterococcus faecalis
MKKDYVIGLDIGTNSVGWAVMTEDYQLVKKKMPIYGNTEKKKIKKNFWGVRLFEEGHTAEDRRLKRTARRRISRRRNRLRYLQAFFEEAMTDLDENFFARLQESFLVPEDKKWHRHPIFAKLEDEVAYHETYPTIYHLRKKLADSSEQADLRLIYLALAHIVKYRGHFLIEGKLSTENTSVKEQFQQFMVIYNQTFVNGESRLVSAPLPESVLIEEELTEKASRTKKSEKVLQQFPQEKANGLFGQFLKLMVGNKADFKKVFGLEEEAKITYASESYEEDLEGILAKVGDEYSDVFLAAKNVYDAVELSTILADSDKKSHAKLSSSMIVRFTEHQEDLKKFKRFIRENCPDEYDNLFKNEQKDGYAGYIAHAGKVSQLKFYQYVKKIIQDIAGAEYFLEKIAQENFLRKQRTFDNGVIPHQIHLAELQAIIHRQAAYYPFLKENQEKIEQLVTFRIPYYVGPLSKGDASTFAWLKRQSEEPIRPWNLQETVDLDQSATAFIERMTNFDTYLPSEKVLPKHSLLYEKFMVFNELTKISYTDDRGIKANFSGKEKEKIFDYLFKTRRKVKKKDIIQFYRNEYNTEIVTLSGLEEDQFNASFSTYQDLLKCGLTRAELDHPDNAEKLEDIIKILTIFEDRQRIRTQLSTFKGQFSAEVLKKLERKHYTGWGRLSKKLINGIYDKESGKTILDYLVKDDGVSKHYNRNFMQLINDSQLSFKNAIQKAQSSEHEETLSETVNELAGSPAIKKGIYQSLKIVDELVAIMGYAPKRIVVEMARENQTTSTGKRRSIQRLKIVEKAMAEIGSNLLKEQPTTNEQLRDTRLFLYYMQNGKDMYTGDELSLHRLSHYDIDHIIPQSFMKDDSLDNLVLVGSTENRGKSDDVPSKKVVKKMKAYWEKLYAAGLISQRKFQRLTKGEQGGLTLEDKAHFIQRQLVETRQITKNVAGILDQRYNAKSKEKKVQIITLKASLTSQFRSIFGLYKVREVNDYHHGQDAYLNCVVATTLLKVYPNLAPEFVYGEYPKFQAFKENKATAKTIIYTNLMRFFTEDEPRFTKDSEILWSNSYLKTIKKELNYHQMNIVKKVEVQKGGFSKESIKPKGPSNKLIPVKNGLDPQKYGGFDSPVVAYTVLFTHEKGKKPLIKQEILGITIMEKTRFEQNPILFLEEKGFLRPRVLMKLPKYTLYEFPEGRRRLLASAKEAQKGNQMVLPEHLLTLLYHAKQCLLPNQSESLAYVEQHQPEFQEILERVVDFAEVHTLAKSKVQQIVKLFEANQTADVKEIAASFIQLMQFNAMGAPSTFKFFQKDIERARYTSIKEIFDATIIYQSTTGLYETRRKVVD

SEQ ID NO: 201 - protein, 1337 aa, Enterococcus faecalis
MKKDYVIGLDIGTNSVGWAVMTEDYQLVKKKMPIYGNTEKKKIKKNFWGVRLFEEGHTAEDRRLKRTARRRISRRRNRLRYLQAFFEEAMTALDENFFARLQESFLVPEDKKWHRHPIFAKLEDEVAYHETYPTIYHLRKKLADSSEQADLRLIYLALAHIVKYRGHFLIEGKLSTENISVKEQFQQFMIIYNQTFVNGESRLVSAPLPESVLIEEELTEKASRTKKSEKVLQQFPQEKANGLFGQFLKLMVGNKADFKKVFGLEEEAKITYASESYEEDLEGILAKVGDEYSDVFLAAKNVYDAVELSTILADSDKKSHAKLSSSMIVRFTEHQEDLKNFKRFIRENCPDEYDNLFKNEQKDGYAGYITHAGKVSQLKFYQYVKKIIQDIAGAEYFLEKIAQENFLRKQRTFDNGVIPHQIHLAELQAIIHRQAAYYPFLKENQEKIEQLVTFRIPYYVGPLSKGDANTFAWLKRQSEEPIRPWNLQETVDLDQSATAFIERMTNFDTYLPSEKVLPKHSLLYEKFMVFNELTKISYTDDRGIKANFSGKEKEKIFDYLFKTRRKVKKKDIIQFYRNEYNTEIVTLSGLEEDQFNASFSTYQDLLKCGLTRAELDHPDNAEKLEDIIKILTIFEDRQRIRTQLSTFKGQFSAEVLKKLERKHYTGWGRLSKKLINGIYDKESGKTILDYLIKDDGVSKHYNRNFMQLINDSQLSFKNAIQKAQSSEHEETLSETVNELAGSPAIKKGIYQSLKIVDELVAIMGYAPKRIVVEMARENQTTSTGKRRSIQRLKIVEKAMAEIGSNLLKEQPTTNEQLRDTRLFLYYMQNGKDMYTGDELSLHRLSHYDIDHIIPQSFMKDDSLDNLVLVGSTENRGKSDDVPSKEVVKDMKAYWEKLYAAGLISQRKFQRLTKGEQGGLTLEDKAHFIQRQLVETRQITKNVAGILDQRYNAKSKEKKVQIITLKASLTSQFRSIFGLYKVREVNDYHHGQDAYLNCVVATTLLKVYPNLAPEFVYGEYPKFQTFKENKATAKAIIYTNLLRFFTEDEPRFTKDGEILWSNSYLKTIKKELNYHQMNIVKKVEVQKGGFSKESIKPKGPSNKLIPVKNGLDPQKYGGFDSPIVAYTVLFTHEKGKKPLIKQEILGITIMEKTRFEQNPILFLEEKGFLRPRVLMKLPKYTLYQFPEGRRRLLASAKEAQKGNQMVLPEHLLTLLYHAKQCLLPNQSESLAYVEQHQPEFQEILERVVDFAEVHTLAKSKVQQIVKLFEANQTADVKEIAASFIQLMQFNAMGAPSTFKFFQKDIERARYTSIKEIFDATIIYQSTTGLYETRRKVVD

SEQ ID NO: 202 - protein, 1337 aa, Enterococcus faecalis
MKKDYVIGLDIGTNSVGWAVMTEDYQLVKKKMPIYGNTEKKKIKKNFWGVRLFEEGHTAEDRRLKRTARRRISRRRNRLRYLQAFFEEAMTALDENFFARLQESFLVPEDKKWHRHPIFAKLEDEVAYHETYPTIYHLRKKLADSSEQADLRLIYLALAHIVKYRGHFLIEGKLSTENISVKEQFQQFMIIYNQTFVNGESRLVSTPLPESVLIEEELTEKASRTKKSEKVLQQFPQEKANGLFGQFLKLMVGNKADFKKVFGLEEEAKITYASESYEEDLEGILAKVGDEYSDVFLAAKNVYDAVELSTILADSDKKSHAKLSSSMIVRFTEHQEDLKNFKRFIRENCPDEYDNLFKNEQKDGYAGYITHAGKVSQLKFYQYVKKIIQDIAGAEYFLEKIAQENFLRKQRTFDNGVIPHQIHLAELQAIIHRQAAYYPFLKENQEKIEQLVTFRIPYYVGPLSKGDASTFAWLKRQSEEPIRPWNLQETVDLDQSATAFIERMTNFDTYLPSEKVLPKHSLLYEKFMVFNELTKISYTDDRGIKANFSGKEKEKIFDYLFKTRRKVKKKDIIQFYRNEYNTEIVTLSGLEEDQFNASFSTYQDLLKCGLTRAELDHPDNAEKLEDIIKILTIFEDRQRIRTQLSTFKGQFSAEVLKKLERKHYTGWGRLSKKLINGIYDKESGKTILDYLVKDDGVSKHYNRNFMQLINDSQLSFKNAIQKAQSSEHEETLSETVNELAGSPAIKKGIYQSLKIVDELVAIMGYAPKRIVVEMARENQTTSTGKRRSIQRLKIVEKAMAEIGSNLLKEQPTTNEQLRDTRLFLYYMQNGKDMYTGDELSLHRLSHYDIDHIIPQSFMKDDSLDNLVLVGSTENRGKSDDVPSKEVVKDMKAYWEKLYAAGLISQRKFQRLTKGEQGGLTLEDKAHFIQRQLVETRQITKNVAGILDQRYNAKSKEKKVQIITLKASLTSQFRSIFGLYKVREVNDYHHGQDAYLNCVVATTLLKVYPNLAPEFVYGEYPKFQTFKENKATAKAIIYTNLLRFFTEDEPRFTKDGEILWSNSYLKTIKKELNYHQMNIVKKVEVQKGGFSKESIKPKGPSNKLIPVKNGLDPQKYGGFDSPIVAYTVLFTHEKGKKPLIKQEILGITIMEKTRFEQNPILFLEEKGFLRPRVLMKLPKYTLYEFPEGRRRLLASAKEAQKGNQMVLPEHLLTLLYHAKQCLLPNQSESLAYVEQHQPEFQEILERVVDFAEVHTLAKSKVQQIVKLFEANQTADVKEIAASFIQLMQFNAMGAPSTFKFFQKDIERARYTSIKEIFDATIIYQSTTGLYETRRKVVD

SEQ ID NO: 203 - protein, 1337 aa, Enterococcus faecalis
MKKDYVIGLDIGTNSVGWAVMTEDYQLVKKKMPIYGNTEKKKIKKNFWGVRLFEEGHTAEDRRLKRTARRRISRRRNRLRYLQAFFEEAMTDLDENFFARLQESFLVPEDKKWHRHPIFAKLEDEVAYHETYPTIYHLRKKLADSSEQADLRLIYLALAHIVKYRGHFLIEGKLSTENISVKEQFQQFMIIYNQTFVNGESRLVSAPLPESVLIEEELTEKASRTKKSEKVLQQFPQEKANGLFGQFLKLMVGNKADFKKVFGLEEEAKITYASESYEEDLEGILAKVGDEYSDVFLAAKNVYDAVELSTILADSDKKSHAKLSSSMIVRFTEHQEDLKKFKRFIRENCPDEYDNLFKNEQKDGYAGYIAHAGKVSQLKFYQYVKKIIQDIAGAEYFLEKIAQENFLRKQRTFDNGVIPHQIHLAELQAIIHRQAAYYPFLKENQEKIEQLVTFRIPYYVGPLSKGDASTFAWLKRQSEEPIRPWNLQETVDLDQSATAFIERMTNFDTYLPSEKVLPKHSLLYEKFMVFNELTKISYTDDRGIKANFSGKEKEKIFDYLFKTRRKVKKKDIIQFYRNEYNTEIVTLSGLEEDQFNASFSTYQDLLKCGLTRAELDHPDNAEKLEDIIKILTIFEDRQRIRTQLSTFKGQFSAEVLKKLERKHYTGWGRLSKKLINGIYDKESGKTILDYLVKDDGVSKHYNRNFMQLINDSQLSFKNAIQKAQSSEHEETLSETVNELAGSPAIKKGIYQSLKIVDELVAIMGYAPKRIVVEMARENQTTSTGKRRSIQRLKIVEKAMAEIGSNLLKEQPTTNEQLRDTRLFLYYMQNGKDMYTGDELSLHRLSHYDIDHIIPQSFMKDDSLDNLVLVGSTENRGKSDDVPSKEVVKDMKAYWEKLYAAGLISQRKFQRLTKGEQGGLTLEDKAHFIQRQLVETRQITKNVAGILNQRYNANSKEKKVQIITLKASLTSQFRSIFGLYKVREVNDYHHGQDAYLNCVVATTLLKVYPNLAPEFVYGEYPKFQTFKENKATAKAIIYTNLLRFFTEDEPRFTKDGEILWSNSYLKTIKKELNYHQMNIVKKVEVQKGGFSKESIKPKGPSNKLIPVKNGLDPQKYGGFDSPVVAYTVLFTHEKGKKPLIKQEILGITIMEKTRFEQNPILFLEEKGFLRPRVLMKLPKYTLYEFPEGRRRLLASAKEAQKGNQMVLPEHLLTLLYHAKQCLLPNQSESLAYVEQHQPEFQEILERVVDFAEVHTLAKSKVQQIVKLFEANQTADVKEIAASFIQLMQFNAMGAPSTFKFFQKDIERARYTSIKEIFDATIIYQSTTGLYETRRKVVD

SEQ ID NO: 204 - protein, 1339 aa, Enterococcus faecalis
MKKDYVIGLDIGTNSVGWAVMTEDYQLVKKKMPIYGNTEKKKIKKNFWGVRLFEEGHTAEDRRLKRTARRRISRRRNRLRYLQAFFEEAMTALDENFFARLQESFLVPEDKKWHRHPIFAKLEDEVAYHETYPTIYHLRKKLADSSEQADLRLIYLALAHIVKYRGHFLIEGKLSTENISVKEQFQQFMIIYNQTFVNGESRLVSAPLPESVLIEEELTEKASRTKKSEKVLQQFPQEKANGLFGQFLKLMVGNKADFKKVFGLEEEAKIKITYASESYEEDLEGILAKVGDEYSDVFLAAKNVYDAVELSTILADSDKKSHAKLSSSMIVRFTEHQEDLKNFKRFIRENCPDEYDNLFKNEQKDGYAGYIAHAGKVSQLKFYQYVKKIIQDIAGAEYFLEKIAQENFLRKQRTFDNGVIPHQIHLAELQAIIHRQAAYYPFLKENQKKIEQLVTFRIPYYVGPLSKGDASTFAWLKRQSEEPIRPWNLQETVDLDQSATAFIERMTNFDTYLPSEKVLPKHSLLYEKFMVFNELTKISYTDDRGIKANFSGKEKEKIFDYLFKTRRKVKKKDIIQFYRNEYNTEIVTLSGLEEDQFNASFSTYQDLLKCGLTRAELDHPDNAEKLEDIIKILTIFEDRQRIRTQLSTFKGQFSEEVLKKLERKHYTGWGRLSKKLINGIYDKESGKTILDYLIKDDGVSKHYNRNFMQLINDSQLSFKNAIQKAQSSEHEETLSETVNELAGSPAIKKGIYQSLKIVDELVAIMGYAPKRIVVEMARENQTTSTGKRRSIQRLKIVEKAMAEIGSNLLKEQPTTNEQLRDTRLFLYYMQNGKDMYTGDELSLHRLSHYDIDHIIPQSFMKDDSLDNLVLVGSTENRGKSDDVPSKEVVKKMKAYWEKLYAAGLISQRKFQRLTKGEQGGLTLEDKAHFIQRQLVETRQITKNVAGILDQRYNAKSKEKKVQIITLKASLTSQFRSIFGLYKVREVNDYHHGQDAYLNCVVATTLLKVYPNLAPEFVYGEYPKFQAFKENKATAKAIIYTNLLRFFTEDEPRFTKDGEILWSNSYLKTIKKELNYHQMNIVKKVEVQKGGFSKESIKPKGPSNKLIPVKNGLDPQKYGGFDSPVVAYTVLFTHEKGKKPLIKQEILGITIMEKTRFEQNPILFLEEKGFLRPRVLMKLPKYTLYEFPEGRRRLLASAKEAQKGNQMVLPEHLLTLLYHAKQCLLPNQSESLAYVEQHQPEFQEILERVVDFAEVHTLAKSKVQQIVKLFEANQTADVKEIAASFIQLMQFNAMGAPSTFKFFQKDIERARYTSIKEIFDATIIYQSTTGLYETRRKVVD

SEQ ID NO: 205 - protein, 1337 aa, Enterococcus faecalis
MKKDYVIGLDIGTNSVGWAVMTEDYQLVKKKMPIYGNTEKKKIKKNFWGVRLFEEGHTAEDRRLKRTARRRISRRRNRLRYLQAFFEEAMTALDENFFARLQESFLVPEDKKWHRHPIFAKLEDEVAYHETYPTIYHLRKKLADSSEQADLRLIYLALAHIVKYRGHFLIEGKLSTENISVKEQFQQFMIIYNQTFVNGESRLVSAPLPESVLIEEELTEKASRTKKSEKVLQQFPQEKANGLFGQFLKLMVGNKADFKKVFGLEEEAKITYASESYEEDLEGILAKVGDEYSDVFLAAKNVYDAVELSTILADSDKKSHAKLSSSMIVRFTEHQEDLKKFKRFIRENCPDEYDNLFKNEQKDGYAGYIAHAGKVSQLKFYQYVKKIIQDIAGAEYFLEKIAQENFLRKQRTFDNGVIPHQIHLAELQAIIHRQAAYYPFLKENQEKIEQLVTFRIPYYVGPLSKGDASTFAWLKRQSEEPIRPWNLQETVDLDQSATAFIERMTNFDTYLPSEKVLPKHSLLYEKFMVFNELTKISYTDDRGIKANFSGKEKEKIFDYLFKTRRKVKKKDIIQFYRNEYNTEIVTLSGLEEDQFNASFSTYQDLLKCGLTRAELDHPDNAEKLEDIIKILTIFEDRQRIRTQLSTFKGQFSAEVLKKLERKHYTGWGRLSKKLINGIYDKESGKTILGYLIKDDGVSKHYNRNFMQLINDSQLSFKNAIQKAQSSEHEETLSETVNELAGSPAIKKGIYQSLKIVDELVAIMGYAPKRIVVEMARENQTTSTGKRRSIQRLKIVEKAMAEIGSNLLKEQPTTNEQLRDTRLFLYYMQNGKDMYTGDELSLHRLSHYDIDHIIPQSFMKDDSLDNLVLVGSTENRGKSDDVPSKEVVKDMKAYWEKLYAAGLISQRKFQRLTKGEQGGLTLEDKAHFIQRQLVETRQITKNVAGILDQRYNAKSKEKKVQIITLKASLTSQFRSIFGLYKVREVNDYHHGQDAYLNCVVATTLLKVYPNLAPEFVYGEYPKFQTFKENKATAKAIIYTNLLRFFTEDEPRFTKDGEILWSNSYLKTIKKELNYHQMNIVKKVEVQKGGFSKESIKPKGPSNKLIPVKNGLDPQKYGGFDSPIVAYTVLFTHEKGKKPLIKQEILGITIMEKTRFEQNPILFLEEKGFLRPRVLMKLPKYTLYEFPEGRRRLLASAKEAQKGNQMVLPEHLLTLLYHAKQCLLPNQSESLAYVEQHQPEFQEILERVVDFAEVHTLAKSKVQQIVKLFEANQTADVKEIAASFIQLMQFNAMGAPSTFKFFQKDIERARYTSIKEIFDATIIYQSTTGLYETRRKVVD

SEQ ID NO: 206 - protein, 1337 aa, Enterococcus faecalis
MKKDYVIGLDIGSNSVGWAVMTEDYQLVKKKMPIYGNTEKKKIKKNFWGVRLFEEGHTAEDRRLKRTARRRISRRRNRLRYLQAFFEEAMTDLDENFFARLQESFLVPEDKKWHRHPIFAKLEDEVAYHETYPTIYHLRKKLADSSEQADLRLIYLALAHIVKYRGHFLIEGKLSTENTSVKDQFQQFMVIYNQTFVNGESRLVSAPLPESVLIEEELTEKASRTKKSEKVLQQFPQEKANGLFGQFLKLMVGNKADFKKVFGLEEEAKITYASESYEEDLEGILAKVGDEYSDVFLAAKNVYDAVELSTILADSDKKSHAKLSSSMIVRFTEHQEDLKNFKRFIRENCPDEYDNLFKNEQKDGYAGYITHAGKVSQLKFYQYVKKIIQDIAGAEYFLEKIAQENFLRKQRTFDNGVIPHQIHLAELQAIIHRQAAYYPFLKENQEKIEQLVTFRIPYYVGPLSKGDASTFAWLKRQSEEPIRPWNLQETVDLDQSATAFIERMTNFDTYLPSEKVLPKHSLLYEKFMVFNELTKISYTDDRGIKANFSGKEKEKIFDYLFKTRRKVKKKDIIQFYRNEYNTEIVTLSGLEEDQFNASFSTYQDLLKCGLTRAELDHPDNAEKLEDIIKILTIFEDRQRIRTQLSTFKGQFSAEVLKKLERKHYTGWGRLSKKLINGIYDKESGKTILDYLIKDDGVSKHYNRNFMQLINDSQLSFKNAIQKAQSSEHEETLSETVNELAGSPAIKKGIYQSLKIVDELVAIMGYAPKRIVVEMARENQTTSTGKRRSIQRLKIVEKAMAEIGSNLLKEQPTTNEQLRDTRLFLYYMQNGKDMYTGDELSLHRLSHYDIDHIIPQSFMKDDSLDNLVLVGSTENRGKSDDVPSKEVVKDMKAYWEKLYAAGLISQRKFQRLTKGEQGGLTLEDKAHFIQRQLVETRQITKNVAGILDQLYNAKSKEKKVQIITLKASLTSQFRSIFGLYKVREVNDYHHGQDAYLNCVVATTLLKVYPNLAPEFVYGEYPKFQTFKENKATAKTIIYTNLMRFFTEDEPRFTKDGEILWSNSYLKTIKKELNYHQMNIVKKVEVQKGGFSKESIKPKGPSNKLIPVKNGLDPQKYGGFDSPVVAYTVLFTHEKGKKPLIKQEILGITIMEKTRFEQNPILFLEEKGFLRPRVLMKLPKYTLYEFPEGRRRLLASAKEAQKGNQMVLPEHLLTLLYHAKQCLLPNQSESLAYVEQHQPEFQEILERVVDFAEVHTLAKSKVQQIVKLFEANQTADVKEIAASFIQLMQFNAMGAPSTFKFFQKDIERARYTSIKEIFDATIIYQSTTGLYETRRKVVD

SEQ ID NO: 207 - protein, 1337 aa, Enterococcus faecalis
MKKDYVIGLDIGTNSVGWAVMTEDYQLVKKKMPIYGNTEKKKIKKNFWGVRLFEEGHTAEDRRLKRTARRRISRRRNRLRYLQAFFEEAMTALDENFFARLQESFLVPEDKKWHRHPIFAKLEDEVAYHETYPTIYHLRKKLADSSEQADLRLIYLALAHIVKYRGHFLIEGKLSTENISVKEKFQQFMIIYNQTFVNGEGRLVSAPLPESVLIEEELTEKASRTKKSEKVLQQFPQEKANGLFGQFLKLMVGNKADFKKVFGLEEEAKITYASESYEEDLEGILAKVGDEYSDVFLAAKNVYDAVELSTILADSDKKSYAKLSSSMIVRFTEHQEDLKKFKRFIRENCPDEYDNLFKNEQKDGYAGYIAHAGKVSQLKFYQYVKKIIQDIAGAEYFLEKIAQENFLRKQRTFDNGVIPHQIHLAELQAIIHRQAAYYPFLKENQEKIEQLVTFRIPYYVGPLSKGDASTFAWLKRQSEEPIRPWNLQETVDLDQSATAFIERMTNFDTYLPSEKVLPKHSLLYEKFMVFNELTKISYTDDRGIKANFSGKEKEKIFDYLFKTRRKVKKKDIIQFYRNEYNTEIVTLSGLEEDQFNASFSTYQDLLKCGLTRAELDHPDNAEKLEDIIKILTIFEDRQRIRTQLSTFKGQFSAEVLKKLERKHYTGWGRLSKKLINGIYDKESGKTILDYLVKDDGVSKHYNRNFMQLINDSQLSFKNAIQKAQSSEHEETLSETVNELAGSPAIKKGIYQSLKIVDELVAIMGYAPKRIVVEMARENQTTSTGKRRSIQRLKIVEKAMAEIGSNLLKEQPTTNEQLRDTRLFLYYMQNGKDMYTGDELSLHRLSHYDIDHIIPQSFMKDDSLDNLVLVGSTENRGKSDDVPSKEVVKDMKAYWEKLYAAGLISQRKFQRLTKGEQGGLTLEDKAHFIQRQLVETRQITKNVAGILDQRYNAKSKEKKVQIITLKASLTSQFRSIFGLYKVREVNDYHHGQDAYLNCVVATTLLKVYPNLAPEFVYGEYPKFQTFKENKATAKAIIYTNLLRFFTEDEPRFTKDGEILWSNSYLKTIKKELNYHQMNIVKKVEVQKGGFSKESIKPKGPSNKLIPVKNGLDPQKYGGFDSPIVAYTVLFTHEKGKKPLIKQEILGITIMEKTRFEQNPILFLEEKGFLRPRVLMKLPKYTLYEFPEGRRRLLASAKEAQKGNQMVLPEHLLTLLYHAKQCLLPNQSESLAYVEQHQPEFQEILERVVDFAEVHTLAKSKVQQIVKLFEANQTADVKEIAASFIQLMQFNAMGAPSTFKFFQKDIERARYTSIKEIFDATIIYQSTTGLYETRRKVVD

SEQ ID NO: 208 - protein, 1337 aa, Enterococcus faecalis
MKKDYVIGLDIGTNSVGWAVMTEDYQLVKKKMPIYGNTEKKKIKKNFWGVRLFEEGHTAEDRRLKRTARRRISRRRNRLRYLQAFFEEAMTALDENFFARLQESFLVPEDKKWHRHPIFAKLEDEVAYHETYPTIYHLRKKLADSSEQADLRLIYLALAHIVKYRGHFLIEGKLSTENISVKDQFQQFMVIYNQTFVNGESRLVSAPLPESVLIEEELTEKASRTKKSEKVLQQFPQEKANGLFGQFLKLMVGNKADFKKVFGLEEEAKITYASESYEEDLEGILAKVGDEYSDVFLAAKNVYDAVELSTILADSDKKSHAKLSSSMIVRFTEHQEDLKNFKRFIRENCPDEYDNLFKNEQKDGYAGYIAHAGKVSQLKFYQYVKKIIQDIAGAEYFLEKIAQENFLRKQRTFDNGVIPHQIHLAELQAIIHRQAAYYPFLKENQKKIEQLVTFRIPYYVGPLSKGDASTFAWLKRQSEEPIRPWNLQETVDLDQSATAFIERMTNFDTYLPSEKVLPKHSLLYEKFMVFNELTKISYTDDRGIKANFSGKEKEKIFDYLFKTRRKVKKKDIIQFYRNEYNTEIVTLSGLEEDQFNASFSTYQDLLKCGLTRAELDHPDNAEKLEDIIKILTIFEDRQRIRTQLSTFKGQFSAEVLKKLERKHYTGWGRLSKKLINGIYDKESGKTILDYLIKDDGVSKHYNRNFMQLINDSQLSFKNAIQKAQSSEHEETLSETVNELAGSPAIKKGIYQSLKIVDELVAIMGYAPKRIVVEMARENQTTSTGKRRSIQRLKIVEKAMAEIGSNLLKEQPTTNEQLRDTRLFLYYMQNGKDMYTGDELSLHRLSHYDIDHIIPQSFMKDDSLDNLVLVGSTENRGKSDDVPSKEVVKKMKAYWEKLYAAGLISQRKFQRLTKGEQGGLTLEDKAHFIQRQLVETRQITKNVAGILDQRYNAKSKEKKVQIITLKASLTSQFRSIFGLYKVREVNDYHHGQDAYLNCVVATTLLKVYPNLAPEFVYGEYPKFQAFKENKAMAKAIIYTNLLRFFTEDEPRFTKDGEILWSNSYLKTIKKELNYHQMNIVKKVEVQKGGFSKESIKPKGPSNKLIPVKNGLDPQKYGGFDSPVVAYTVLFTHEKGKKPLIKQEILGITIMEKTRFEQNPILFLEEKGFLRPRVLMKLPKYTLYEFPEGRRRLLASAKEAQKGNQMVLPERLLTLLYHAKQCLLPNQSESLAYVEQHQPEFQEILERVVDFAEVHTLAKSKVQQIVKLFEANQTADVKEIAASFIQLMQFNAMGAPSTFKFFQKDIERARYTSIKEIFDATIIYQSTTGLYETRRKVVD

SEQ ID NO: 209 - protein, 1337 aa, Enterococcus faecalis
MKKDYVIGLDIGTNSVGWAVMTEDYQLVKKKMPIYGNTEKKKIKKNFWGVRLFEEGHTAEDRRLKRTARRRISRRRNRLRYLQAFFEEAMTALDENFFARLQESFLVPEDKKWHRHPIFAKLEDEVAYHETYPTIYHLRKKLADSSEQADLRLIYLALAHIVKYRGHFLIEGKLSTENISVKEQFQQFMIIYNQTFVNGESRLVSAPLPESVLIEEELTEKASRTKKSEKVLQQFPQEKANGLFGQFLKLMVGNKADFKKVFGLEEEAKITYASESYEEDLEGILAKVGDEYSDVFLAAKNVYDAVELSTILADSDKKSHAKLSSSMIVRFTEHQEDLKKFKRFIRENCPDEYDNLFKNEQKDGYAGYIAHAGKVSQLKFYQYVKKIIQDIAGAEYFLEKIAQENFLRKQRTFDNGVIPHQIHLAELQAIIHRQAAYYPFLKENQEKIEQLVTFRIPYYVGPLSKGDASTFAWLKRQNEKPIRPWNLQETVDLDQSATAFIERMTNFDTYLPSEKVLPKHSLLYEKFMVFNELTKISYTDDRGIKANFSGKEKEKIFDYLFKTRRKVKKKDIIQFYRNEYNTEIVTLSGLEEDQFNASFSTYQDLLKCGLTRAELDHPDNAEKLEDIIKILTIFEDRQRIRTQLSTFKGQFSAEVLKKLERKHYTGWGRLSKKLINGIYDKESGKTILDYLIKDDGVSKHYNRNFMQLINDSQLSFKNAIQKAQSSEHEETLSETVNELAGSPAIKKGIYQSLKIVDELVAIMGYAPKRIVVEMARENQTTSTGKRRSIQRLKIVEKAMAEIGSNLLKEQPTTNEQLRDTRLFLYYMQNGKDMYTGDELSLHRLSHYDIDHIIPQSFMKDDSLDNLVLVGSTENRGKSDDVPSKEVVKKMKAYWEKLYAAGLISQRKFQRLTKGEQGGLTLEDKAHFIQRQLVETRQITKNVAGILDQRYNAKSKEKKVQIITLKASLTSQFRSIFGLYKVREVNDYHHGQDAYLNCVVATTLLKVYPNLAPEFVYGEYPKFQAFKENKATAKAIIYTNLMRFFTEVEPRFTKDGEILWSNSYLKTIKKELNYHQMNIVKKVEVQKGGFSKESIKPKGPSNKLIPVKNGLDPQKYGGFDSPVVAYTVLFTHEKGKKPLIKQEILGITIMEKTKFEQNPILFLEEKGFLRPRVLMKLPKYTLYEFPEGRRRLLASAKEAQKGNQMVLPEHLLTLLYHAKQCLLPNQSESLAYVEQHQPEFQEILERVVDFAEVHTLAKSKVQQIVKLFETNQTADVKEIAASFIQLMQFNAMGAPSTFKFFQKDIERARYTSIKEIFDATIIYQSTTGLYETRRKVVD

SEQ ID NO: 210 - protein, 1337 aa, Enterococcus faecalis
MKKDYVIGLDIGTNSVGWAVMTEDYQLVKKKMPIYGNTEKKKIKKNFWGVRLFEEGHTAEDRRLKRTARRRISRRRNRLRYLQAFFEEAMTALDENFFARLQESFLVPEDKKWHRHPIFAKLEDEVAYHETYPTIYHLRKKLADSSEQADLRLIYLALAHIVKYRGHFLIEGKLSTENISVKEQFQQFMIIYNQTFVNGESRLVSAPLPESVLIEEELTEKASRTKKSEKVLQQFPQEKANGLFGQFLKLMVGNKADFKKVFGLEEEAKITYASESYEEDLEGILAKVGDEYSDVFLAAKNVYDAVELSTILADSDKKSHAKLSSSMIVRFTEHQEDLKNFKRFIRENCPDEYDNLFKNEQKDGYAGYIAHAGKVSQLKFYQYVKKIIQDIAGAEYFLEKIAQENFLRKQRTFDNGVIPHQIHLAELQAIIHRQAAYYPFLKENQKKIEQLVTFRIPYYVGPLSKGDASTFAWLKRQSEEPIRPWNLQETVDLDQSATAFIERMTNFDTYLPSEKVLPKHSLLYEKFMVFNELTKISYTDDRGIKANFSGKEKEKIFDYLFKTRRKVKKKDIIQFYRNEYNTEIVTLSGLEEDQFNASFSTYQDLLKCGLTRAELDHPDNAEKLEDIIKILTIFEDRQRIRTQLSTFKGQFSEEVLKKLERKHYTGWGRLSKKLINGIYDKESGKTILDYLIKDDGVSKHYNRNFMQLINDSQLSFKNAIQKAQSSEHEETLSETVNELAGSPAIKKGIYQSLKIVDELVAIMGYAPKRIVVEMARENQTTSTGKRRSIQRLKIVEKAMAEIGSNLLKEQPTTNEQLRDTRLFLYYMQNGKDMYTGDELSLHRLSHYDIDHIIPQSFMKDDSLDNLVLVGSTENRGKSDDVPSKEVVKKMKAYWEKLYAAGLISQRKFQRLTKGEQGGLTLEDKAHFIQRQLVETRQITKNVAGILDQRYNAKSKEKKVQIITLKASLTSQFRSIFGLYKVREVNDYHHGQDAYLNCVVATTLLKVYPNLAPEFVYGEYPKFQAFKENKATAKAIIYTNLLRFFTEDEPRFTKDGEILWSNSYLKTIKKELNYHQMNIVKKVEVQKGGFSKESIKPKGPSNKLIPVKNGLDPQKYGGFDSPVVAYTVLFTHEKGKKPLIKQEILGITIMEKTRFEQNPILFLEEKGFLRPRVLMKLPKYTLYEFPEGRRRLLASAKEAQKGNQMVLPEHLLTLLYHAKQCLLPNQSESLAYVEQHQPEFQEILERVVDFAEVHTLAKSKVQQIVKLFEANQTADVKEIAASFIQLMQFNAMGAPSTFKFFQKDIERARYTSIKEIFDATIIYQSTTGLYETRRKVVD

SEQ ID NO: 211 - protein, 1339 aa, Enterococcus faecium
MKKEYTIGLDIGTNSVGWSVLTDDYRLVSKKMKVAGNTEKSSTKKNFWGVRLFDEGQTAEARRSKRTARRRLARRRQRILELQKIFAPEILKIDEHFFARLNESFLVLDEKKQSRHPVFATIKQEKSYHQTYPTIYHLRQALADSSEKADIRLVYLAMAHLLKYRGHFLIEGELNTENSSVTETFRQFLSTYNQQFSEADDKQTEKLDEAVDCSFVFTEKMSKTKKAETLLKYFPHEKSNGYLSQFIKLMVGNQGNFKNVFGLEEAKLQFSKETYEEDLEELLEKIGDDYIDLFVQAKNVYDAVLLSEILSDSTKNTRAKLSAGMIRRYDAHKEDLVLLKRFVKENLPKKYRAFFGDNSVNGYAGYIEGHATQEDFYKFVKKELTGIRGSEVFLTKIEQENFLRKQRTFDNGVIPHQIHLTELRAIIANQKKHYPFLKEEQEKLESLLTFKIPYYVGPLAKKQENSPFAWLIRKSEEKIKPWNLPEIVDMEGSAVRFIERMINTDMYMPHNKVLPKNSLLYQKFSIYNELTKVRYQDERGQMNYFSSIEKKEIFHELFEKNRKVTKKDLQEFLYLKYDIKHAELSGIEKAFNASYTTYHDFLTMSENKREMKQWLEDPELASMFEEIIKTLTVFEDREMIKTRLSHHEATLGKHIIKKLTKKHYTGWGRLSKELIQGIRDKQSNKTILDYLINDDDFPHHRNRNFMQLINDDSLSFKKEIKKAQMITDTENLEEIVKELTGSPAIKKGILQSLKIVDEIVGIMGYEPANIVVEMARENQTTGRGLKSSRPRLKALEESLKDFGSQLLKEYPTDNSSLQKDRLYLYYLQNGRDMYTGAPLDIHRLSDYDIDHIIPRSFTTDNSIDNKVLVSSKENRLKKDDVPSEKVVKKMRSFWYDLYSSKLISKRKLDNLTKIKLTEEDKAGFIKRQLVETRQITKHVAGILHHRFNKAEDTNEPIRKVRIITLKSALVSQFRNRFGIYKVREINEYHHAHDAYLNGVVALALLKKYPQLAPEFVYGEYLKFNAHKANKATVKKEFYSNIMKFFESDTPVCDENGEIFWDKSKSIAQVKKVINHHHMNIVKKTEIQKGGFSKETVEPKKDSSKLLPRKNNWDPAKYGGLGSPNVAYTVAFTYEKGKARKRTNALEGITIMEREAFEQSPVLFLKNKGYEQAEIEMKLPKYALFELENGRKRMVASNKEAQKANSFLLPEHLVTLLYHAKQYDEISHKESFDYVNEHHKEFSEVFARVLEFAGKYTLAEKNIEKLEKIYKENQTDDLAKLASSFVNLMQFNAMGAPADFKFFDVTIPRKRYTSLTEIWQSTIIHQSITGLYETRIRMGK

SEQ ID NO: 212 - protein, 1340 aa, Enterococcus faecium
MKKEYTIGLDIGTNSVGWSVLTDDYRLVSKKMKVAGNTEKSSTKKNFWGVRLFDEGQTAEARRSKRTARRRLARRRQRILELQKIFAPEILKIDEHFFARLNESFLVPDEKKQSRHPVFATIKQEKSYHQTYPTIYHLRQALADSSEKADIRLVYLAMAHLLKYRGHFLIEGELNTENSSVTETFRQFLSTYNQQFSEAGDKQTEKLDEAVDCSFVFTEKMSKTKKAETLLKYFPHEKSNGYLSQFIKLMVGNQGNFKNVFGLEEEAKLQFSKETYEEDLEELLEKIGDDYIDLFVQAKNVYDAVLLSEILSDSTKNTRAKLSAGMIRRYDAHKEDLVLLKRFVKENLPKKYRAFFGDNSVNGYAGYIEGHATQEAFYKFVKKELTGIRGSEVFLTKIEQENFLRKQRTFDNGVIPHQIHLSELRAIIANQKKHYPFLKEEQEKLESLLTFKIPYYVGPLAKKQENSPFAWLIRKSEEKIKPWNLPEIVDMEGSAVRFIERMINTDMYMPHNKVLPKNSLLYQKFSIYNELTKVRYQDERGQMNYFSSIEKKEIFHELFEKNRKVTKKDLQEFLYLKYDIKHAELSGIEKAFNASYTTYHDFLTMSENKREMKQWLEDPELASMFEEIIKTLTVFEDREMIKTRLSHHEATLGKHIIKKLTKKHYTGWGRLSKELIQGIRDKQSNKTILDYLINDDDFPHHRNRNFMQLINDDSLSFKKEIKKAQMITDTENLEEIVKELTGSPAIKKGILQSLKIVDEIVGIMGYEPANIVVEMARENQTTGRGLKSSRPRLKALEESLKDFGSQLLKEYPTDNSSLQKDRLYLYYLQNGRDMYTGAPLDIHRLSDYDIDHIIPRSFTTDNSIDNKVLVSSKENRLKKDDVPSEKVVKKMRSFWYDLYSSKLISKRKLDNLTKIKLTEEDKAGFIKRQLVETRQITKHVAGILHHRFNKAEDTNDPIRKVRIITLKSALVSQFRNRFGIYKVREINEYHHAHDAYLNGVVALALLKKYPQLAPEFVYGEYLKFNAHKANKATVKKEFYSNIMKFFESDTPVCDENGEIFWDKSKSIAQVKKVINHHHMNIVKKTEIQKGGFSKETVEPKKDSSKLLPRKNNWDPAKYGGLGSPNVAYTVAFTYEKGKARKRTNALEGITIMEREAFEQSPVLFLKNKGYEQAEIEMKLPKYALFELENGRKRMVASNKEAQKANSFLLPEHLVTLLYHAKQYDEISHKESFDYVNEHHKEFSEVFARVLEFAGKYTLAEKNIEKLEKIYKENQTDDLAKLASSFVNLMQFNAMGAPADFKFFDVTIPRKRYTSLTEIWQSTIIHQSITGLYETRIRMGK

SEQ ID NO: 213 - protein, 1340 aa, Enterococcus faecium
MKKEYTIGLDIGTNSVGWSVLTDDYRLVSKKMKVAGNTEKSSTKKNFWGVRLFDEGQTAEARRSKRTARRRLARRRQRILELQKIFAPEILKIDEHFFARLNESFLVLDEKKQSRHPVFATIKQEKSYHQTYPTIYHLRQALADSSEKADIRLVYLAMAHLLKYRGHFLIEGELNTENSSVTETFRQFLSTYNQQFSEADDKQTEKLDEAVDCSFVFTEKMSKTKKAETLLKYFPHEKSNGYLSQFIKLMVGNQGNFKNVFGLEEEAKLQFSKETYEEDLEELLEKIGDDYIDLFVQAKNVYDAVLLSEILSDSTKNTRAKLSAGMIRRYDAHKEDLVLLKRFVKENLPKKYRAFFGDNSVNGYAGYIEGHATQEDFYKFVKKELTGIRGSEVFLTKIEQENFLRKQRTFDNGVIPHQIHLTELRAIIANQKKHYPFLKEEQEKLESLLTFKIPYYVGPLAKKQENSPFAWLIRKSEEKIKPWNLPEIVDMEGSAVRFIERMNNTDMYIPHNKVLPKNSLLYQKFSIYNELTKVRYQDERGQMNYFSSIEKKEIFHELFEKNRKVTKKDLQEFLYLKYDIKHAELSGIEKAFNASYTTYHDFLTMSENKREMKQWLEDPELASMFEEIIKTLTVFEDREMIKTRLSHHEATLGKHIIKKLTKKHYTGWGRLSKELIQGIRDKQSNKTILDYLINDDDFPHHRNRNFMQLINDDSLSFKKEIKKAQMITDTENLEEIVKELTGSPAIKKGILQSLKIVDEIVGIMGYEPANIVVEMARENQTTGRGLKSSRPRLKALEESLKDFGSQLLKEYPTDNSSLQKDRLYLYYLQNGRDMYTGAPLDIHRLSDYDIDHIIPRSFTTDNSIDNKVLVSSKENRLKKDDVPSEKVVKKMRSFWYDLYSSKLISKRKLDNLTKIKLTEEDKAGFIKRQLVETRQITKHVAGILHHRFNKAEDTNEPIRKVRIITLKSALVSQFRNRFGIYKVREINEYHHAHDAYLNGVVALALLKKYPQLAPEFVYGEYLKFNAHKANKATVKKEFYSNIMKFFESDTPVCDENGEIFWDKSKSIAQVKKVINHHHMNIVKKTEIQKGGFSKETVEPKKDSSKLLPRKNNWDPAKYGGLGSPNVAYTVAFTYEKGKARKRTNALEGITIMEREAFEQSPVLFLKNKGYEQAEIEMKLPKYALFELENGRKRMVASNKEAQKANSFLLPEHLVTLLYHAKQYDEISHKESFDYVNEHHKEFSEVFARVLEFAGKYTLAEKNIEKLEKIYKENQTDDLAKLASSFVNLMQFNAMGAPADFKFFDVTIPRKRYTSLTEIWQSTIIHQSITGLYETRIRMGK

SEQ ID NO: 214 - protein, 1340 aa, Enterococcus faecium
MKKEYTIGLDIGTNSVGWSVLTDDYRLVSKKMKVAGNTEKSSTKKNFWGVRLFDEGQTAEARRSKRTARRRLARRRQRILELQKIFAPEILKIDEHFFARLNESFLVLDEKKQSRHPVFATIKQEKSYHQTYPTIYHLRQALADSSEKADIRLVYLAMAHLLKYRGHFLIEGELNTENSSVTETFRQFLSTYNQQFSEADDKQTEKLDEAVDCSFVFTEKMSKTKKAETLLKYFPHEKSNGYLSQFIKLMVGNQGNFKNVFGLEEEAKLQFSKETYEEDLEELLEKIGDDYIDLFVQAKNVYDAVLLSEILSDSTKNTRAKLSAGMIRRYDAHKEDLVLLKRFVKENLPKKYRAFFGDNSVNGYAGYIEGHATQEDFYKFVKKELTGIRGSEVFLTKIEQENFLRKQRTFDNGVIPHQIHLTELRAIIANQKKHYPFLKEEQEKLESLLTFKIPYYVGPLAKKQENSPFAWLIRKSEEKIKPWNLPEIVDMEGSAVRFIERMINTDMYIPHNKVLPKNSLLYQKFSIYNELTKVRYQDERGQMNYFSSIEKKEIFHELFEKNRKVTKKDLQEFLYLKYDIKHAELSGIEKAFNASYTTYHDFLTMSENKREMKQWLEDPELASMFEEIIKTLTVFEDREMIKTRLSHHEATLGKHIIKKLTKKHYTGWGRLSKELIQGIRDKQSNKTILDYLINDDDFPHHRNRNFMQLINDDSLSFKKEIKKAQMITDTENLEEIVKELTGSPAIKKGILQSLKIVDEIVGIMGYEPANIVVEMARENQTTGRGLKSSRPRLKALEESLKDFGSQLLKEYPTDNSSLQKDRLYLYYLQNGRDMYTGAPLDIHRLSDYDIDHIIPRSFTTDNSIDNKVLVSSKENRLKKDDVPSEKVVKKMRSFWYDLYSSKLISKRKLDNLTKIKLTEEDKAGFIKRQLVETRQITKHVAGILHHRFNKAEDTNEPIRKVRIITLKSALVSQFRNRFGIYKVREINEYHHAHDAYLNGVVALALLKKYPQLAPEFVYGEYLKFNAHKANKATVKKEFYSNIMKFFESDTPVCDENGEIFWDKSKSIAQVKKVINHHHMNIVKKTEIQKGGFSKETVEPKKDSSKLLPRKNNWDPAKYGGLGSPNVAYTVAFTYEKGKARKRTNALEGITIMEREAFEQSPVLFLKNKGYEQAEIEMKLPKYALFELENGRKRMVASNKEAQKANSFLLPEHLVTLLYHAKQYDEISHKESFDYVNEHHKEFSEVFARVLEFAGKYTLAEKNIEKLEKIYKENQTDDLAKLASSFVNLMQFNAMGAPADFKFFDVTIPRKRYTSLTEIWQSTIIHQSITGLYETRIRMGK

SEQ ID NO: 215 - protein, 1339 aa, Enterococcus faecium
MKKEYTIGLDIGTNSVGWSVLTDDYRLVSKKMKVAGNTEKSSTKKNFWGVRLFDEGQTAEARRSKRTARRRLARRRQRILELQKIFAPEILKIDEHFFARLNESFLVLDEKKQSRHPVFATIKQEKSYHQTYPTIYHLRQALADSSEKADIRLVYLAMAHLLKYRGHFLIEGELNTENSSVTETFRQFLSTYNQQFSEADDKQTEKLDEAVDCSFVFTEKMSKTKKAETLLKYFPHEKSNGYLSQFIKLMVGNQGNFKNVFGLEEAKLQFSKETYEEDLEELLEKIGDDYIDLFVQAKNVYDAVLLSEILSDSTKNTRAKLSAGMIRRYDAHKEDLVLLKRFVKENLPKKYRAFFGDNSVNGYAGYIEGHATQEDFYKFVKKELTGIRGSEVFLTKIEQENFLRKQRTFDNGVIPHQIHLTELRAIIANQKKHYPFLKEEQEKLESLLTFKIPYYVGPLAKKQENSPFAWLIRKSEEKIKPWNLPEIVDMEGSAVRFIERMINTDMYIPHNKVLPKNSLLYQKFSIYNELTKVRYQDERGQMNYFSSIEKKEIFHELFEKNRKVTKKDLQEFLYLKYDIKHAELSGIEKAFNASYTTYHDFLTMSENKREMKQWLEDPELASMFEEIIKTLTVFEDREMIKTRLSHHEATLGKHIIKKLTKKHYTGWGRLSKELIQGIRDKQSNKTILDYLINDDDFPHHRNRNFMQLINDDSLSFKKEIKKAQMITDTENLEEIVKELTGSPAIKKGILQSLKIVDEIVGIMGYEPANIVVEMARENQTTGRGLKSSRPRLKALEESLKDFGSQLLKEYPTDNSSLQKDRLYLYYLQNGRDMYTGAPLDIHRLSDYDIDHIIPRSFTTDNSIDNKVLVSSKENRLKKDDVPSEKVVKKMRSFWYDLYSSKLISKRKLDNLTKIKLTEEDKAGFIKRQLVETRQITKHVAGILHHRFNKAEDTNEPIRKVRIITLKSALVSQFRNRFGIYKVREINEYHHAHDAYLNGVVALALLKKYPQLAPEFVYGEYLKFNAHKANKATVKKEFYSNIMKFFESDTPVCDENGEIFWDKSKSIAQVKKVINHHHMNIVKKTEIQKGGFSEETVEPKKDSSKLLPRKNNWDPAKYGGLGSPNVAYTVAFTYEKGKARKRTNALEGITIMEREAFEQSPVLFLKNKGYEQAEIEMKLPKYALFELENGRKRMVASNKEAQKANSFLLPEHLVTLLYHAKQYDEISHKESFDYVNEHHKEFSEVFARVLEFAGKYTLAEKNIEKLEKIYKENQTDDLAKLASSFVNLMQFNAMGAPADFKFFDVTIPRKRYTSLTEIWQSTIIHQSITGLYETRIRMGK

SEQ ID NO: 216 - protein, 1340 aa, Enterococcus faecium
MKKEYTIGLDIGTNSVGWSVLTDDYRLVSKKMKVAGNTEKSSTKKNFWGVRLFDEGQTAEARRSKRTARRRLARRRQRILELQKIFAPEILKIDEHFFARLNESFLVLDEKKQSRHPVFATIKQEKSYHQTYPTIYHLRQALADSSEKADIRLVYLAMAHLLKYRGHFLIEGELNTENSSVTETFRQFLSTYNQQFSEADDKQTEKLDEAVDCSFVFTEKMSKTKKAETLLKYFPHEKSNGYLSQFIKLMVGNQGNFKNVFGLEEEAKLQFSKETYEEDLEELLEKIGDDYIDLFVQAKNVYDAVLLSEILSDSTKNTRAKLSAGMIRRYDAHKEDLVLLKRFVKENLPKKYRAFFGDNSVNGYAGYIEGHATQEDFYKFVKKELTGIRGSEVFLTKIEQENFLRKQRTFDNGVIPHQIHLTELRAIIANQKKHYPFLKEEQEKLESLLTFKIPYYVGPLAKKQENSPFAWLIRKSEEKIKPWNLPEIVDMEGSAVRFIERMINTDMYMPHNKVLPKNSLLYQKFSIYNELTKVRYQDERGQMNYFSSIEKKEIFHELFEKNRKVTKKDLQEFLYLKYDIKHAELSGIEKAFNASYTTYHDFLTMSENKREMKQWLEDPELASMFEEIIKTLTVFEDREMIKTRLSHHEATLGKHIIKKLTKKHYTGWGRLSKELIQGIRDKQSNKTILDYLINDDDFPHHRNRNFMQLINDDSLSFKKEIKKAQMITDTENLEEIVKELTGSPAIKKGILQSLKIVDEIVGIMGYEPANIVVEMARENQTTGRGLKSSRPRLKALEESLKDFGSQLLKEYPTDNSSLQKDRLYLYYLQNGRDMYTGAPLDIHRLSDYDIDHIIPRSFTTDNSIDNKVLVSSKENRLKKDDVPSEKVVKKMRSFWYDLYSSKLISKRKLDNLTKIKLTEEDKAGFIKRQLVETRQITKHVAGILHHRFNKAEDTNEPIRKVRIITLKSALVSQFRNRFGIYKVREINEYHHAHDAYLNGVVALALLKKYPQLAPEFVYGEYLKFNAHKANKATVKKEFYSNIMKFFESDTPVCDENGEIFWDKSKSIAQVKKVINHHHMNIVKKTEIQKGGFSKETVEPKKDSSKLLPRKNNWDPAKYGGLGSPNVAYTVAFTYEKGKARKRTNALEGITIMEREAFEQSPVLFLKNKGYEQAEIEMKLPKYALFELENGRKRMVASNKEAQKANSFLLPEHLVTLLYHAKQYDEISHKESFDYVNEHHKEFSEVFARVLEFAGKYTLAEKNIEKLEKIYKENQTDDLAKLASSFVNLMQFNAMGAPADFKFFDVTIPRKRYTSLTEIWQSTIIHQSITGLYETRIRMGK

SEQ ID NO: 217 - protein, 1340 aa, Enterococcus faecium
MKKEYTIGLDIGTNSVGWSVLTDDYRLVSKKMKVAGNTEKSSTKKNFWGVRLFDEGQTAEARRSKRTARRRLARRRQRILELQKIFAPEILKIDEHFFARLNESFLVLDEKKQSRHPVFATIKQEKSYHQTYPTIYHLRQALADSSEKADIRLVYLAMAHLLKYRGHFLIEGELNTENSSVTETFRQFLSTYNQQFSEADDKQTEKLDEAVDCSFVFTEKMSKTKKAETLLKYFPHEKSNGYLSQFIKLMVGNQGNFKNVFGLEEEAKLQFSKETYEEDLEELLEKIGDDYIDLFVQAKNVYDAVLLSEILSDSTKNTRAKLSAGMIRRYDAHKEDLVLLKRFVKENLPKKYRAFFGDNSVNGYAGYIEGHATQEDFYKFVKKELTGIRGSEVFLTKIEQENFLRKQRTFDNGVIPHQIHLTELRAIIANQKKHYPFLKEEQEKLESLLTFKIPYYVGPLAKKQENSPFAWLIRKSEEKIKPWNLPEIVDMEGSAVRFIERMINTDMYIPHNKVLPKNSLLYQKFSIYNELTKVRYQDERGQMNYFSSIEKKEIFHELFEKNRKVTKKDLQEFLYLKYDIKHAELSGIEKAFNASYTTYHDFLTMSENKREMKQWLEDPELASMFEEIIKTLTVFEDREMIKTRLSHHEATLGKHIIKKLTKKHYTGWGRLSKELIQGIRDKQSNKTILDYLINDDDFPHHRNRNCMQLINDDSLSFKKEIKKAQMITDTENLEEIVKELTGSPAIKKGILQSLKIVDEIVGIMGYEPANIVVEMARENQTTGRGLKSSRPRLKALEESLKDFGSQLLKEYPTDNSSLQKDRLYLYYLQNGRDMYTGAPLDIHRLSDYDIDHIIPRSFTTDNSIDNKVLVSSKENRLKKDDVPSEKVVKKMRSFWYDLYSSKLISKRKLDNLTKIKLTEEDKAGFIKRQLVETRQITKHVAGILHHRFNKAEDTNEPIRKVRIITLKSALVSQFRNRFGIYKVREINEYHHAHDAYLNGVVALALLKKYPQLAPEFVYGEYLKFNAHKANKATVKKEFYSNIMKFFESDTPVCDENGEIFWDKSKSIAQVKKVINHHHMNIVKKTEIQKGGFSKETVEPKKDSSKLLPRKNNWDPTKYGGLGSPNVAYTVAFTYEKGKARKRTNALEGITIMEREAFEQSPVLFLKNKGYEQAEIEMKLPKYALFELENGRKRMVASNKEAQKANSFLLPEHLVTLLYHAKQYDEISHKESFDYVNEHHKEFSEVFARVLEFAGKYTLAEKNIEKLEKIYKENQTDDLAKLASSFVNLMQFNAMGAPADFKFFDVTIPRKRYTSLTEIWQSTIIHQSITGLYETRIRMGK

SEQ ID NO: 218 - protein, 1336 aa, Enterococcus faecium
MTKDYTIGLDIGTNSVGWAVLTDDYQLMKRKMSVHGNTEKKKIKKNFWGARLFDEGQTAEFRRTKRTNRRRLARRKYRLSKLQDLFAEELCKQDDCFFVRLEESFLVPEEKQYKPASIFPTLEEEKEYYQKYPTIYHLRQKLVDSTEKEDLRLVYLALAHLLKYRGHFLFEGDLDTENTSIEESFRVFLEQYSKQSDQPLIVHQPVLTILTDKLSKTKKVEEILKYYPTEKINSFFAQCLKLIVGNQANFKRIFDLEAEVKLQFSKETYEEDLESLLEKIGDEYLDIFLQAKKVHDAILLSEIISSTVKHTKAKLSSGMVERYERHKADLAKFKQFVKENVPQKATVFFKDTTKNGYAGYIKGKTTQEEFYKFVKKELSGVVGSEPFLEKIDQETFLLKQRTYTNGVIPHQVHLIELKAIIDQQKQHYPFLEEAGPKIIALFKFRIPYYVGPLAKEQEASSFAWIERKTAEKINPWNFSEVVDIEKSAMRFIQRMTKQDTYLPTEKVLPKNSLLYQKYMIFNELTKVSYKDERGVKQYFSGDEKQQIFKQLFQKERGKITVKKLQNFLYTHYHIENAQIFGIEKAFNASYSTYHDFMKLAKTNQKAMQEWLEQPEMEPIFEDIVKILTIFEDRQMIKHQLSKYQEVFGEKLLKEFARKHYTGWGRFSAKLIHGIRDRKTNKTILDYLINDDDVPANRNRNLMQLINDEHLSFKEEIAKATVFSKHKSLVDVIQDLPGSPAIKKGIWQSLKIVEELIAIIGYKPKNIVIEMARENQKTHRTSPRLKALENGLKQIGSTLLKEQPTDNKALQKERLYLYYLQNGRDMYTGEPLEIENLHQYEVDHIIPRSFIVDNSIDDKVLVASKQNQKKRDDVPKKQIVNEQRIFWNQLKEAKLISTKKYAYLTKIELTPEDKARFIQRQLVETRQITKHVANILHQSFNQEEEGTDCDGVQIITLKATLTSQFRQTFGLYKVREINPHHHAHDAYLNGFIANVLLKRYPKLAPEFVYGKYVKYSLARENKATAKKEFYSNILKFLESDEPFCDENGEIYWEKSHHLPRIKKVLSSHQVNVVKKVEQQKGGFYKETVNSKEKPDKLIERKNNWDVTKYGGFGSPVIAYAIAFVYAKGKTQKKTRAIEGITIMEQAAFEKDPTTFLKEKGFPQVTEFIKLPKYTLFEFDNGRRRFLASHKESQKGNPFILSDQLVTLLYHAQHYDKITYQESFDYVNTHLSDFSAILTEVLAFAEKYTLADKNIERIQELYEENKYGETSMIAQSFLQLLQFNAIGAPADFKFFGVTIPRKRYTSLTEIWDATIIYQSVTGLYETRIRMGDLWAGEQ

SEQ ID NO: 219 - protein, 1340 aa, Enterococcus faecium
MKKEYTIGLDIGTNSVGWSVLTDDYRLVSKKMKVAGNTEKSSTKKNFWGVRLFDEGQTAEARRSKRTARRRLARRRQRILELQKIFAPEILKIDEHFFARLNESFLVLDEKKQSRHPVFATIKQEKSYHQTYPTIYHLRQALADSSEKADIRLVYLAMAHLLKYRGHFLIEGELNTENSSVTETFRQFLSTYNQQFSEADDKQTEKLDEAVDCSFVFTEKMSKTKKAETLLKYFPHEKSNGYLSQFIKLMVGNQGNFKNVFGLEEEAKLQFSKETYEEDLEELLEKIGDDYIDLFVQAKNVYDAVLLSEILSDSTKNTRAKLSAGMIRRYDAHKEDLVLLKRFVKENLPKKYRAFFGDNSVNGYAGYIEGHATQEDFYKFVKKELTGIRGSEVFLTKIEQENFLRKQRTFDNGVIPHQIHLTELRAIIANQKKHYPFLKEEQEKLESLLTFKIPYYVGPLAKKQENSPFAWLIRKSEEKIKPWNLPEIVDMEGSAVRFIERMINTDMYMPHNKVLPKNSLLYQKFSIYNELTKVRYQDERGQMNYFSSIEKKEIFHELFEKNRKVTKKDLQEFLYLKYDIKHAELSGIEKAFNASYTTYHDFLTMSENKREMEQWLEDPELASMFEEIIKTLTVFEDREMIKTRLSHHEATLGKHIIKKLTKKHYTGWGRLSKELIQGIRDKQSNKTILDYLINDDDFPHHRNRNFMQLINDDSLSFKKEIKKAQMITDTENLEEIVKELTGSPAIKKGILQSLKIVDEIVGIMGYEPANIVVEMARENQTTGRGLKSSRPRLKALEESLKDFGSQLLKEYPTDNSSLQKDRLYLYYLQNGRDMYTGAPLDIHRLSDYDIDHIIPRSFTTDNSIDNKVLVSSKENRLKKDDVPSEKVVKKMRSFWYDLYSSKLISKRKLDNLTKIKLTEEDKAGFIKRQLVETRQITKHVAGILHHRFNKAEDTNEPIRKVRIITLKSALVSQFRNRFGIYKVREINEYHHAHDAYLNGVIALALLKKYPQLAPEFVYGEYLKFNAHKANKATVKKEFYSNIMKFFESDTPVCDENGEIFWDKSKSIAQVKKVINHHHMNIVKKTEIQKGGFSKETVEPKKDSSKLLPRKNNWDPAKYGGLGSPNVAYTVAFTYEKGKARKRTNALEGITIMEREAFEQSPVLFLKNKGYEQAEIEMKLPKYALFELENGRKRMVASNKEAQKANSFLLPEHLVTLLYHAKQYDEISHKESFDYVNEHHKEFSEVFARVLEFAGKYTLAEKNIEKLEKIYKENQTDDLAKLASSFVNLMQFNAMGAPADFKFFDVTIPRKRYTSLTEIWQSTIIHQSITGLYETRIRMGK

SEQ ID NO: 220 - protein, 1336 aa, Enterococcus hirae
MTKDYTIGLDIGTNSVGWAVLTDDYQLMKRKMSVHGNTEKKKIKKNFWGARLFDEGQTAEFRRTKRTNRRRLARRKYRLSKLQDLFAEELCKQDDCFFVRLEESFLVPEEKQYKPASIFPTLEEEKEYYQKYPTIYHLRQKLVDSTEKGDLRLVYLALAHLLKYRGHFLFEGDLDTENTSIEESFRVFLEQYGKQSDQPLIVHQPVLTILTDKLSKTKKVEEILKYYPTEKINSFFAQCLKLIVGNQANFKRIFDLEAEVKLQFSKETYEEDLESLLEKIGDEYLDIFLQAKKVHDAILLSEIISSTVKHTQAKLSSGMVERYERHKADLAKFKQFVKENVPQKATVFFKDTTKNGYAGYIKGKTTQEEFYKFVKKELSGVVGSEPFLEKIDQETFLLKQRTYTNGVIPHQVHLIELKAIIDQQKQHYPFLEEAGPKIIALFKFRIPYYVGPLAKEQEASSFAWIERKTAEKINPWNFSEVVDIEKSAMRFIQRMTKQDTYLPTEKVLPKNSLFYQKYMIFNELTKVSYKDERGVKQYFSGDEKQQIFKQLFQKERGKITVKKLQNFLYTHYHIENAQIFGIEKAFNASYSTYHDFMKLAKTNQKAMQEWLEQPEMEPIFEDIVKILTIFEDRQMIKHQLSKYQEVFGEKLLKEFARKHYTGWGRFSAKLIHGIRDRKTNKTILDYLINDDDVPANRNRNLMQLINDEHLSFKEEIAKATVFSKHKSLVDVIQDLPGSPAIKKGIWQSLKIVEELIAIIGYKPKNIVIEMARENQKTHRTKPRLKALENGLKQIGSTLLKEQPTDNKALQKERLYLYYLQNGRDMYTGEPLEIENLHQYEVDHIIPRSFIVDNSIDNKVLVASKQNQKKRDDVPKKQIVNEQRIFWNQLKEAKLISPKKYAYLTKIELTPEDKARFIQRQLVETRQITKHVANILHQSFNQEEEGTDCDGVQIITLKATLTSQFRQTFGLYKVREINPHHHAHDAYLNGFIANVLLKRYPKLAPEFVYGKYVKYSLARENKATAKKEFYSNILKFLESDEPFCDENGEIYWEKSHHLPRIKKVLSSHQVNVVKKVEQQKGGFYKETVNSKEKPDKLIERKNNWDVTKYGGFGSPVIAYAIAFVYAKGKTQKKTKAIEGITIMEQAAFEKDPTTFLKDKGFPQVTEFIKLPKYTLFEFDNGRRRFLASHKESQKGNPFILSDQLVTLLYHAQHYDKITYQESFDYVNTHLSDFSAILTEVLAFAEKYTLADKNIERIQELYEENKYGEISMIAQSFLQLLQFNAIGAPADFKFFGVTIPRKRYTSLTEIWDATIIYQSVTGLYETRIRMGDLWAGEQ

SEQ ID NO: 221 - protein, 1336 aa, Enterococcus hirae
MTKDYTIGLDIGTNSVGWAVLTDDYQLMKRKMSVHGNTEKKKIKKNFWGARLFDEGQTAEFRRTKRTNRRRLARRKYRLSKLQDLFAEELCKQDDCFFVRLEESFLVPEEKQYKPASIFPTLEEEKEYYQKYPTIYHLRQKLVDSTEKEDLRLVYLALAHLLKYRGHFLFEGDLDTENTSIEESFRVFLEQYSKQSDQPLIVHQPVLTILTDKLSKTKKVEEILKYYPTEKINSFFAQCLKLIVGNQANFKRIFDLEAEVKLQFSKETYEEDLESLLEKIGDEYLDIFLQAKKVHDAILLSEIISSTVKHTKAKLSSGMVERYERHKADLAKFKQFVKENVPQKATVFFKDTTKNGYAGYIKGKTTQEEFYKFVKKELSGVVGSEPFLEKIDQETFLLKQRTYTNGVIPHQVHLIELKAIIDQQKQHYPFLEEAGPKIIALFKFRIPYYVGPLAKEQEASSFAWIERKTAEKINPWNFSEVVDIEKSAMRFIQRMTKQDTYLPTEKVLPKNSLLYQKYMIFNELTKVSYKDERGVKQYFSGDEKQQIFKQLFQKERGKITVKKLQNFLYTHYHIENAQIFGIEKAFNASYSTYHDFMKLAKTNQKAMQEWLEQPEMEPIFEDIVKILTIFEDRQMIKHQLSKYQEVFGEKLLKEFARKHYTGWGRFSAKLIHGIRDRKTNKTILDYLINDDDVPANRNRNLMQLINDEHLSFKEEIAKATVFSKHKSLVDVIQDLPGSPAIKKGIWQSLKIVEELIAIIGYKPKNIVIEMARENQKTHRTSPRLKALENGLKQIGSTLLKEQPTDNKALQKERLYLYYLQNGRDMYTGEPLEIENLHQYEVDHIIPRSFIVDNSIDNKVLVASKQNQKKRDDVPKKQIVNEQRIFWNQLKEAKLISPKKYAYLTKIELTPEDKARFIQRQLVETRQITKHVANILHQSFNQEEEGTDCDGVQIITLKATLTSQFRQTFGLYKVREINPHHHAHDAYLNGFIANVLLKRYPKLAPEFVYGKYVKYSLARENKATAKKEFYSNILKFLESDEPFCDENGEIYWEKSHHLPRIKKVLSSHQVNVVKKVEQQKGGFYKETVNSKEKPDKLIERKNNWDVTKYGGFGSPVIAYAIAFVYAKGKTQKKTRAIEGITIMEQAAFEKDPTTFLKEKGFPQVTEFIKLPKYTLFEFDNGRRRFLASHKESQKGNPFILSDQLVTLLYHAQHYDKITYQESFDYVNTHLSDFSAILTEVLAFAEKYTLADKNIERIQELYEENKYGETSMIAQSFLQLLQFNAIGAPADFKFFGVTIPRKRYTSLTEIWDATIIYQSVTGLYETRIRMGDLWAGEQ

SEQ ID NO: 222 - protein, 1336 aa, Enterococcus hirae
MTKDYTIGLDIGTNSVGWAVLTDDYQLMKRKMSVHGNTEKKKIKKNFWGARLFDEGQTAEFRRTKRTNRRRLARRKYRLSKLQDLFAEELCKQDDCFFVRLEESFLVPEEKQYKPASIFPTLEEEKEYYQKYPTIYHLRQKLVDSTEKEDLRLVYLALAHLLKYRGHFLFEGDLDTENTSIEESFRVFLEQYGKQSDQPLIVHQPVLTILTDKLSKTKKVEEILKYYPTEKINSFFAQCLKLIVGNQANFKRIFDLEAEVKLQFSKETYEEDLESLLEKIGDEYLDIFLQAKKVHDAILLSEIISSTVKHTQAKLSSGMVERYERHKADLAKFKQFVKENVPQKATVFFKDTTKNGYAGYIKGKTTQEEFYKFVKKELSGVVGSEPFLEKIDQETFLLKQRTYTNGVIPHQVHLIELKAIIDQQKQHYPFLEEAGPKIIALFKFRIPYYVGPLAKEQEASSFAWIERKTAEKINPWNFSEVVDIEKSAMRFIQRMTKQDTYLPTEKVLPKNSLLYQKYMIFNELTKVSYKDERGVKQYFSGDEKQQIFKQLFQKERGKITVKKLQNFLYTHYHIENAQIFGIEKAFNASYSTYHDFMKLAKTNQKAMQEWLEQPEMEPIFEDIVKILTIFEDRQMIKHQLSKYQEVFGEKLLKEFARKHYTGWGRFSAKLIHGIRDRKTNKTILDYLINDDDVPANRNRNLMQLINDEHLSFKEEIAKATVFSKHKSLVDVIQDLPGSPAIKKGIWQSLKIVEELIAIIGYKPKNIVIEMARENQKTHRTKPRLKALENGLKQIGSTLLKEQPTDNKALQKERLYLYYLQNGRDMYTGEPLEIENLHQYEVDHIIPRSFIVDNSIDNKVLVASKQNQKKRDDVPNKQIVNEQRIFWNQLKEAKLISPKKYAYLTKIELTPEDKARFIQRQLVETRQITKHVANILHQSFNQEEEGTDCDGVQIITLKATLTSQFRQTFGLYKVREINPHHHAHDAYLNGFIANVLLKRYPKLAPEFVYGKYVKYSLARENKATAKKEFYSNILKFLESDEPFCDENGEIYWEKSHHLPRIKKVLSSHQVNVVKKVEQQKGGFYKETVNSKEKPDKLIERKNNWDVTKYGGFGSPVIAYAIAFVYAKGKTQKKTRAIEGITIMEQAAFEKDPTTFLKDKGFPHVTEFIKLPKYTLFEFDNGRRRFLASHKESQKGNPFILSDQLVTLLYHAQHYDKITYQESFDYVNTHLSDFSAILTEVLAFAEKYTLADKNIERIQELYEENKYGEISMIAQSFLQLLQFNAIGAPADFKFFGVTIPRKRYTSLTEIWDATIIYQSVTGLYETRIRMGDLWAGEQ

SEQ ID NO: 223 - protein, 1330 aa, Enterococcus italicus
MKNDYTIGLDIGTNSVGYSVVTDDYKVISKKMNVFGNTEKKSIKKNFWGVRLFESGQTAQEARMKRTSRRRIARRKNRICYLQEIFQPEMNHLDNNFFYRLNESFLVADDAKYDKHPIFGTLDEEIHFHEQFPTIYHLRKYLADGDEKADLRLVYLAIAHIIKFRGNFLIEGELNTENNSVIELSKVFVQLYNQTLSELEGFQFIDESIDFSEVLTQQLSKSERADNVLKLFPDEKGTGIFAQFIKLIVGNQGNFKKVFQLEEDQKLQLSTDDYEENIENLLAIIGDEYGDIFVAAQNLYQAILLAGILTSTEKTRAKLSASMIQRYEEHAKDLKLLKRFVKEHIPDKYAEIFNDATKNGYAGYIDGKTKEEEFYKYLKTTLVQKSGYQYFIEKIEQENFLRKQRIYDNGVIPHQVHAEELRAILRKQEKYYSFLKENHEKIEQIFKVRIPYYVGPLAKHNEQSRFAWNIRKSDEPIRPWNMNDVVDENASAVAFIERMTIKDIYLNENVLPRHSLIYEKFTVFNELTKVLYADDRGVFQRFSAEEKEDIFEKLFKSERKVTKKKLENYLRIELSISSPSVKGIEEQFNANFGTYLDLKKFDELHPYLDDEKYQDTLEEVIKVLTVFEDRSMIQNQLEQLPLNLSTKTIKALSRRKYTGWGRLSARLIDGIHDKNSGKTILDYLIEDESDSYIVNRNFMQLINDDHLSFKKIIEDSQPYKEQQSAEEIVSELSGSPAIKKGILQSLKIVDELVAIMGYKPKNIVVEMARENQTTGRGKQNSKPRLKGIENGLKEFSDSVLKGSSIDNKQLQNDRLYLYYLQNGKDMYTGHELDIDHLSTYDIDHIIPQSFLTDNSIDNRVLTTSKSNRGKSDNVPSEEVVRKMDRFWRKLLNAKLISERKYTNLTKKELTESDKAGFLKRQLVETRQITKHVATILDSKFNEDSNNRDVQIITLKSALVSEFRKTFNLYKVREINDLHHAHDAYLNAVVALSLLRVYPQLKPEFVYGEYGKNSIHDQNKATIKKQFYSNITRYFASKDYIINDDGEILWNKQETIAQVIKTLGMHQVNVVKKVEIQKGGFSKESIQPKGESQKLIRRKQQWNTKKYGGFDSPVVAYAILLSFDKGKRKARSFKIVGITIQDRESFEGNPILYLSKKDYHNPKVEAILPKYSLFEFENGRRRMVASASETQKGNQLIIPGHLMELLYHSKKIINGKNSDSVSYIQNNKEKFREIFEYIVDFSSKYISADANLNKIEKIFENNFHKASEQEIAKSFINLLTFTAMGAPADFEFFGEKIPRKRYVSISEIIDAVFIHQSITGLYETRVRLTEV

SEQ ID NO: 224 - protein, 1330 aa, Enterococcus mundtii
MEKEYTIGLDIGTNSVGWAVLTDDYRLVARKMSIQGDSNRKKIKKNFWGARLFEEGKTAQFRRIKRTNRRRIARRRQRVLALQDIFAEEIHKKDPNFFARLEEGDRVEADKRFAKFPVFATLSEEKNYHRQYPTIYHLRHDLANSKEQADIRLVYLAIAHCLKYRGHFLFEGELDTENTSVTENYQQFLQAYQQFFPEPIGDLDDAVPILTERLSKAKRVEKVLAYYPSEKSTGNFAQFLKLMVGNQANFKKTFDLEEEMKLNFTRDCYEEDLNELLEKTSDDYAELFLKAKGVYDAILLSQILSKSDDETKAKLSANMKLRFEEHQRDLKQLKELVRRDLPKKYDDFFKNRSKNGYAGYVKGKATQEDFYKFLRTELAGLEESQSIMEKIDLEIYLLKQRTFANGVIPHQIHLVEMREIMDRQKRFYPFLKGAQGKIEKLLTFRIPYYVGPLAQEGQSPFAWIKRKSPSQITPWNFAEVVDKENSAIEFIERMTNQDTYLPKEKVLPKQSLIYQRFMIFNELTKVSYTDERGKSHYFSSEQKRKIFNELFKQHPRVTEKQLRKFLELNEQIDSTEIKGIETSFNASYSTYHDLLKLSDQMDTLLDDPDMTTMFEEIIKILTIFEDREMIREQLKPYETVLGLPAIKKLAKKHYTGWGRLSEKMIQGMREKQSRKTILDYLIDDDDFPCNRNRNFMQLINDDHLSFKETIANELIMSDSNVLLDQVKAIPGSPAVKKGIWQSIKIVEEIIGIIGKAPKNIVIEMARENQRTSRSRPRLKALEEALKNIDSPLLKDYPTDNQALQKDRLYLYYLQNGKDMYTGEPLEIHRLSEYDIDHIIPRSFIVDNSLDNKVLVSSKVNRGKLDNAPDPLVVKRMRSHWEKLHQAKLISDKKLANLTKQNLTEADKARFIQRQLVETRQITKHVANLLHQHFNLPEEVSATEKTSIITLKSTLTSQFRQMFDIYKVREINHHHHAHDAYLNGVVAMTLLKKYPKLAPEFVYGSYIKGDINQINKATAKKEFYSNIMKFFESEEIICDEQGEVIWNKKRDLSTIKKTIGAHQVNIVKKVEKQKGGFYKETINSKANPEKLIPRKASLDPLKYGGYGSPLVAYTVIFIFEKGKQKKVTKGIEGITVMEQLRFEQDPREFLKTKGYEGVKQWLILPKYILFEAQGGYRRMIASHQETQKANSLILPENLVTLLYHARHYDEINHKVSFDYVNAHKEGFNDIFDFISDFGVRYILAPQHLEKIKVAYEKNKEVDLKEMIDAILSLLKFTLFGASVEFKFFDIKILKRYKSLTDIWEATIIYQSVTGLYERRVEVRKLWDGERL

SEQ ID NO: 225 - protein, 1334 aa, Enterococcus phoeniculicola
MKKEYTIGLDIGTNSVGWAVLTENYDLVKKKMKVYGNTETKYLKKNLWGVRLFDEGETAADRRLKRTTRRRYSRRRNRICRLQDLFTEEMNQVDANFFHRLQESFLVPDEKEFERHAIFGKMEEEVSYYREFPTIYHLRKHLADTSEQADLRLVYLALAHIVKYRGHFLIEGELNTENSSVSETFRTFIQVYNQIFRENEVPLAVPDNIEELFSEKVSRARKVEAILSVYSEEKSTGTLAQFLKLMVGNQGRFKKTFDLEEDGIIQIPKEEYEEELETLLAIIGDEYAEIFSATKSVYDAVALSGILSVTDGDTKAKLSASMVERYEAHQKDLVQFKQFIRKELPEMYAPIFRDNSVSGYAGYVENSKVVTQAEFYKYIKKAIEKVPGAEYFLEKIEQETFLDKQRTFNNGVIPHQIHLEELEAIIQKQATYYPFLADNKEEMKQLVTFRIPYYVGPLADGNSPFAWLERISSEPIRPGNLAEVVDIKKSATKFIERMTNFDTYLPTEKVLPKHSMIYEKYMVYNELTKVSYVDERGMNQRFSGEEKKQIVEELFKQSRKVTKKLLEKFLSNEFGLVDVAIKGIETSFNAGYGTYHDFLKIGITREQLDKEENSETLEEIVKILTVFEDRKMIREQLKKYTYLFDEEVLKKLERRHYTGWGRLSAKLLIGIKEKRTHKTILDYLIEDDGGKQPINRNLMQLINDSDLSFKSEIAEAQSDMNTEDLHEVVQNLAGSPAIKKGILQSLKIVDELVDIMGSLPKNIVVEMARENQTTSRGRTNSNPRMKALEEAMRNLRSNLLKEYPTDNQALQNDRLYLYYLQNGKDMYTGLDLSLHNLSSYDIDHIVPQSFTTDNSLDNRVLVSSKENRGKKDDVPSKEVVQKNITLWETLKNSNLISQKKYDNLTKGLRGGLTEDDRAHFIKRQLVETRQITKHVARILDQRFNSQKDEEGKTIRAVRVVTLKSSLTSQFRKQFAIHKVREINDYHHGHDAYLNGVVANSLLRVYPQLQPEFVYGDYPKFNAYKANKATAKKQLYTNIMKFFAEDAVIIDENGEILWDKKNIATVKKVMSYPQMNIVKKPEIQTGSFSKETIKPKGDSDKLISRKTNWSPKLYGGFDSPQVAYSVIITYEKGKKKVRAKAIVGITIMEQSLFKKDPVSLLEEKGYANPEVLIHLPKYTLYELENGRRRLLASANEAQKGNQLVLPASLVTLLYHAKQVDEDSGKSEEYVREHRAEFAEILNYVQAFSETKILANKNLQTILKLYEENKEADIKEIAESFVNLMKFSAYGAPMDFKFFGKTIPRSRYTSVGELLSATIINQSITGLYETRRKLVD

SEQ ID NO: 226 - protein, 1330 aa, Enterococcus sp. AM1
MGKEYTIGLDIGTNSVGWAVLQEDLDLVRRKMKVYGNTEKNYLKKNFWGVDLFDEGMTAKDTRLKRTTRRRYFRRRQRISYLQTFFQEEMNRIDPNFFNRLDESFLIEEDKLSERHPIFGTIEEEVAYHKNYATIYHLRKELADAEEKADLRLVYLALAHIIKYRGHFLIEGRLSTENTSTEETFKTFLQKYNQTFNPVDETISIGSIFADKVSRAKKAEGVLALFPDEKRNGTFDQFLKMIVGNQGNFKKTFELEEDAKLQFSKEEYDESLEALLGEIGDEYADVFEAAKNVYNAVELSGILTVTDNSTKAKLSASMIKRYEDHKTDLKLFKEFIRKNLPEKYHEIFNDKNTDGYAGYIDNSKKTSQEKFYKYITNLIEKIDGAEYFLKKIENEDFLRKQRTFDNGIIPHQIHLEELKAILHHQAMYYPFLQEKFSNFVDLLTFRIPYYVGPLANGNSRFSWLSRKSDEPIRPWNLAEVVDLSKSAELFIERMTNFDLYLPSEKVLPKHSMLYEKYTVYNELTKVTYKDEQGKVQNFSSEEKERIFIDLFKQHRKVTKKDLSNFLRNEYNLDDVIIDGIENKFNASFNTYHDFLKLKIDPKVLDDPANEPMFEEIVKILTIFEDRKMLREQLSKFSDRLSEKTIKDLERRHYTGWGRLSAKLINGIHDKQSNKTILDYLINDDAPKKNINRNFMQLINDNRLTFKEEIEKEQLKANSEESLIEIVQNLAGSPAIKKGIFQSLKIVDELVEIMGYAPTNIVVEMARENQTTANGRRNSRPRLKNLEKAIDDLDSEILKKHPVDNKALQKDRLYLYYLQNGKDMYTNEELDIHKLSTYDIDHIIPQSFIVDNSLDNRVLVSSSKNRGKLDDVPSKEVVKKMRAFWESLYRSGLISKKKFDNLVKAESGGLSEDDKAGFIHRQLVETRQITKNVARILHQRFNSEKDEEGNLIRKVRIITLKSALTSQFRKNYGIYKIREINDYHHAHDAYLNGVVATALLKIYPQLEPEFVYGEFHRFNAFKENKATAKKQFYSNLMEFSKSDKVIIDENGEILWNQKKIVTVKKVMNYRQMNIVKKVEIQKGGFSKESILPKGDSDKLISRKKEWDTTKYGGFDSPNVAYSVVIRYEKGKTRKLVKTIVGITIMERAAFEKNEREFLKNKGYQNPQICMKLPKYSLYEFDDGRRRLLASAKEAQKGNQMVLPAHLVTFLYHAKHCNEKPDSLKYVTEHQSGFSEIMAHVKDFAEKYTLVDKNLEKILSLYAKNMDSEVKEIAQSFVDLMQLNAFGAPADFKFFGETIPRKRYTSVNELLEATIINQSITGLYETRRRLGD

SEQ ID NO: 227 - protein, 1339 aa, Enterococcus villorum
MNKAYTLGLDIGTNSVGWAVVTDDYRLMAKKMPVHSKMEKKKIKKNFWGARLFDEGQTAEERRNKRATRRRLRRRKYRILELQKIFSEEILKKDSHFFARLDESFLIPEDKQYARFPIFPTLLEEKAYYQNYPTIYHLRQKLADSTEKADIRLVYLALAHMIKYRGHFLFEGELDTENTSVEETFKEFIDIYNEQFEEGIIFYKDIPLILTDKLSKSKKVEKILQYYPKEKTTGCLAQFLKLIVGNQGNFKQAFHLDEEVKIQISKETYEEDLEKLLRKSNEEMIDVFLQVKKVYDAILLSDILSTKMKDTKAKLSAGMIERYQNHKKDLEELKQFVRAHLHEKVTVFFKDSSKDGYAGYIDGKTTQADFYKFLKKELTGVPGSEPMLAKIDQENFLLKQRTPTNGVIPHQVHLTEFKAIIDQQKQYYPFLEKSKEKMIQLLTFRIPYYVGPLAQDKETSSFAWLERKTTEKIKPWNAKDVIDYGASATKFIQRMINYDTYLPTEKVLPKYSMLYQKYTIFNELTKVAYKDDRGIKHQFSSEEKLRIFQELFKKQRRVTKKKLQHFLSANYNIEDAEILGVDKVFNSSYATYHDFLELAKPYTEKIIELLEQPEMEEMFEDIVKIITIFEDREMVRTQLKKYQRILGEEIFKKLVKKKYTGWGRLSKRLINGIRDQKTNKTILDYLINDDDFPYNRNRNFMQLINDDHLSFKEEIAKELTLSDKQSLLEVVEAIPGSPAIKKGIWQTLKIVEELIAIIGYKPKNIVIEMARENQTTTGGKNRSKPRLKSLEEALKNFDSQLLKERPVDNQSLQKDRLYLYYLQNGKDMYTGESLDIDRLSEYDIDHIIPRSFIVDHSLDNKVLVSSKENRLKKDDVPDSKVVKRMKAYWEKLLRANLISERKFSYLTKLELTDDDKARFIQRQLVETRQITKHVAAILHQYFNQTQELEKEKDIRIITLKSSLVSQFRQVFGIHKVREINHHHHAHDAYLNAVVALALLKKYPRLAPEFVYGSFAKFHLVKENKATAKKEFYSNILKFFEKEEQFCDENGEIFWDKRKHIQQIKKVISSHQVNIVKKVEVQTGSFYKETVNTKEKPDKLIKRKNNWDVTKYGGFGSPVVAYAVVFTYEKGKNHKKAKAIEGITIMEQALFEKDPISFLIEKGYSNVNQFIKLPKYTLFELANGQRRMLASHQELQKANSFILPEKLVTLLYHANHYDEIAYKDSYDYVNEHFSNFQDILDKVIIFAEKYTSAPQKLNQIIATYEKNQEADRKIMAHSFVNLMQFNALGAPADFKFFDTTITRKRYTSLTEIWQSTIIYQSVTGLYETRRRMADLWDGVQ

SEQ ID NO: 228 - protein, 1424 aa, Expression vector pCas9
MDYKDHDGDYKDHDIDYKDDDDKMAPKKKRKVGIHGVPAADKKYSIGLDIGTNSVGWAVITDEYKVPSKKFKVLGNTDRHSIKKNLIGALLFDSGETAEATRLKRTARRRYTRRKNRICYLQEIFSNEMAKVDDSFFHRLEESFLVEEDKKHERHPIFGNIVDEVAYHEKYPTIYHLRKKLVDSTDKADLRLIYLALAHMIKFRGHFLIEGDLNPDNSDVDKLFIQLVQTYNQLFEENPINASGVDAKAILSARLSKSRRLENLIAQLPGEKKNGLFGNLIALSLGLTPNFKSNFDLAEDAKLQLSKDTYDDDLDNLLAQIGDQYADLFLAAKNLSDAILLSDILRVNTEITKAPLSASMIKRYDEHHQDLTLLKALVRQQLPEKYKEIFFDQSKNGYAGYIDGGASQEEFYKFIKPILEKMDGTEELLVKLNREDLLRKQRTFDNGSIPHQIHLGELHAILRRQEDFYPFLKDNREKIEKILTFRIPYYVGPLARGNSRFAWMTRKSEETITPWNFEEVVDKGASAQSFIERMTNFDKNLPNEKVLPKHSLLYEYFTVYNELTKVKYVTEGMRKPAFLSGEQKKAIVDLLFKTNRKVTVKQLKEDYFKKIECFDSVEISGVEDRFNASLGTYHDLLKIIKDKDFLDNEENEDILEDIVLTLTLFEDREMIEERLKTYAHLFDDKVMKQLKRRRYTGWGRLSRKLINGIRDKQSGKTILDFLKSDGFANRNFMQLIHDDSLTFKEDIQKAQVSGQGDSLHEHIANLAGSPAIKKGILQTVKVVDELVKVMGRHKPENIVIEMARENQTTQKGQKNSRERMKRIEEGIKELGSQILKEHPVENTQLQNEKLYLYYLQNGRDMYVDQELDINRLSDYDVDHIVPQSFLKDDSIDNKVLTRSDKNRGKSDNVPSEEVVKKMKNYWRQLLNAKLITQRKFDNLTKAERGGLSELDKAGFIKRQLVETRQITKHVAQILDSRMNTKYDENDKLIREVKVITLKSKLVSDFRKDFQFYKVREINNYHHAHDAYLNAVVGTALIKKYPKLESEFVYGDYKVYDVRKMIAKSEQEIGKATAKYFFYSNIMNFFKTEITLANGEIRKRPLIETNGETGEIVWDKGRDFATVRKVLSMPQVNIVKKTEVQTGGFSKESILPKRNSDKLIARKKDWDPKKYGGFDSPTVAYSVLVVAKVEKGKSKKLKSVKELLGITIMERSSFEKNPIDFLEAKGYKEVKKDLIIKLPKYSLFELENGRKRMLASAGELQKGNELALPSKYVNFLYLASHYEKLKGSPEDNEQKQLFVEQHKHYLDEIIEQISEFSKRVILADANLDKVLSAYNKHRDKPIREQAENIIHLFTLTNLGAPAAFKYFDTTIDRKRYTSTKEVLDATLIHQSITGLYETRIDLSQLGGDKRPAATKKAGQAKKKKK

SEQ ID NO: 229 - protein, 1343 aa, Kandleria vitulina
MSQNNNKIYNIGLDIGDASVGWAVVDEHYNLLKRHGKHMWGSRLFTQANTAVERRSSRSTRRRYNKRRERIRLLRGIMEDMVLDVDPTFFIRLANVSFLDQEDKKDYLKENYHSNYNLFIDKDFNDKTYYDKYPTIYHLRKHLCESKEKEDPRLIYLALHHIVKYRGNFLYEGQKFSMDVSNIEDKMIDVLRQFNEINLFEYVEDRKKIDEVLNVLKEPLSKKHKADKAFALFDTTKDNKAAYKELCAALAGNKFNVTKMLKEAELHDEDEKDISFKFSDATFDDAFVEKQPLLGDCVEFIDLLHDIYSWVELQNILGSAHTSEPSISAAMIQRYEDHKNDLKLLKDVIRKYLPKKYFEVFRDEKSKKNNYCNYINHPSKTPVDEFYKYIKKLIEKIDDPDVKTILNKIELESFMLKQNSRTNGAVPYQMQLDELNKILENQSVYYSDLKDNEDKIRSILTFRIPYYFGPLNITKDRQFDWIIKKEGKENERILPWNANEIVDVDKTADEFIKRMRNFCTYFPDEPVLAKNSLTVSKYEVLNEINKLRINDHLIKRDIKDKMLHTLFMDHKSISANAMKKWLVKNQYFSNTDDIKIEGFQKENACSTSLTPWIDFTKIFGEINNSNYELIEKIIYDVTVFEDKKILRRRLKKEYDLDEEKIKKILKLKYSGWSRLSKKLLSGIKTKYKDSTRTPETVLEVMERTNMNLMQVINDEKLGFKKTIDDANSTSVSGKFSYAEVQELAGSPAIKRGIWQALLIVDEIKKIMKHEPAHVYIEFARNEDEKERKDSFVNQMLKLYKDYDFEDETEKEANKHLKGEDAKSKIRSERLKLYYTQMGKCMYTGKSLDIDRLDTYQVDHIVPQSLLKDDSIDNKVLVLSSENQRKLDDLVIPEMIRNKMFGFWNKLYENKIISPKKFYSLIKSEYSDKDKERFINRQIVETRQITKHVAQIISNHYETTKVVTVRADLSHAFRERYHIYKNRDINDFHHAHDAYIATILGTYIGHRFESLDAKYIYGEYQKIFRNNKNKDKEFNKNKDGFILNSMRNLYADKDTGEVVWDPEWISRIKKCFYYKDCFVTKKLEENNGSFFNLTVRPNDEHSEKGTTIAKVPVNKLRSNVHKYGGFEGLKYSIVAIKGKKKKGKKIIDVNKLVGIPLMYKNVDDETKINYIKESEGLEEVKIIKEILKNQLIEINGGLFYVTSPTEIVNARQLILDFNCTRIIDGIYKAMKYKNYSELSQEEIMNVYDIFVEKLKLYYPTYKNIATNFENMREQFENISDEEKCEVIRQMLVVMHAGPQNGNITFDDFKLSNRLGRLNCKTISLDTTVFIADSPTGMYSKKYKL

SEQ ID NO: 230 - protein, 1344 aa, Kandleria vitulina
MSQNNNKIYNIGLDIGDASVGWAVVDEHYNLLKRHGKHMWGSRLFTQANTAVERRSSRSTRRRYNKRRERIRLLREIMEDMVLDVDPTFFIRLANVSFLDQEDKKDYLKENYHSNYNLFIDKDFNDKTYYDKYPTIYHLRKHLCESKEKEDPRLIYLALHHIVKYRGNFLYEGQKFSMDVSNIEDKMIDVLRQFNEINLFEYVEDRKKIDEVLNVLKEPLSKKHKAEKAFALFDTTKDNKAAYKELCAALAGNKFNVTKMLKEAELHDEDEKDISFKFSDATFDDAFVEKQPLLGDCVEFIDLLHDIYSWVELQNILGSAHTSEPSISAAMIQRYEDHKNDLKLLKDVIRKYLPKKYFEVFRDEKSKKNNYCNYINHPSKTPVDEFYKYIKKLIEKIDDPDVKTILNKIELESFMLKQNSRTNGAVPYQMQLDELNKILENQSVYYSDLKDNEDKIRSILTFRIPYYFGPLNITKDRQFDWIIKKEGKENERILPWNANEIVDVDKTADEFIKRMRNFCTYFPDEPVMAKNSLTVSKYEVLNEINKLRINDHLIKRDMKDKMLHTLFMDHKSISANAMKKWLVKNQYFSNTDDIKIEGFQKENACSTSLTPWIDFTKIFGKINESNYDFIEKIIYDVTVFEDKKILRRRLKKEYDLDEEKIKKILKLKYSGWSRLSKKLLSGIKTKYKDSTRTPETVLEVMERTNMNLMQVINDEKLGFKKTIDDANSTSVSGKFSYAEVQELAGSPAIKRGIWQALLIVDEIKKIMKHEPAHVYIEFARNEDEKERKDSFVNQMLKLYKDYDFEDETEKEANKHLKGEDAKSKIRSERLKLYYTQMGKCMYTGKSLDIDRLDTYQVDHIVPQSLLKDDSIDNKVLVLSSENQRKLDDLVIPSSIRNKMYGFWEKLFNNKIISPKKFYSLIKTEFNEKDQERFINRQIVETRQITKHVAQIIDNHYENTKVVTVRADLSHQFRERYHIYKNRDINDFHHAHDAYIATILGTYIGHRFESLDAKYIYGEYKRIFRNQKNKGKEMKKNNDGFILNSMRNIYADKDTGEIVWDPNYIDRIKKCFYYKDCFVTKKLEENNGTFFNVTVLPNDTNSDKDNTLATVPVNKYRSNVNKYGGFSGVNSFIVAIKGKKKKGKKVIEVNKLTGIPLMYKNADEEIKINYLKQAEDLEEVQIGKEILKNQLIEKDGGLYYIVAPTEIINAKQLILNESQTKLVCEIYKAMKYKNYDNLDSEKIIDLYRLLINKMELYYPEYRKQLVKKFEDRYEQLKVISIEEKCNIIKQILATLHCNSSIGKIMYSDFKISTTIGRLNGRTISLDDISFIAESPTGMYSKKYKL

SEQ ID NO: 231 - protein, 1314 aa, Lactobacillus animalis
MLKKDYSIGLDIGTNSVGHAVVTDDYKVPTKKMKVFGDTSKKTIKKNMLGVLLFNEGQTAADTRLKRGARRRYTRRKNRLRYLQEIFAPALAKVDPNFFYRLEESSLVAEDKKYDVYPIFGKREEELLYHDTHKTIYHLRSELANNDRPADLRLVYLALAHIIKYRGNFLLEGEIDLRTTDINKVFAEFSETLNENSDENLGKLDVADIFKDNTFSKTKKSEELLKLSGAKKNQLAHQLFKMMVGNMGSFKKVLGTDEEHKLSFGKDTYEDDLNDLLAEAGDQYLDIFVAAKKVYDAAILASILDVKDTQTKTVFSQAMIERYEEHQKDLIELKRVFKKYLPEKCHDFFSEPKISGYAGYIDGKVSEEDFYKYTKKTLKGIPETEEILQKIDANNYLRKQRTFDNGAIPHQVHLKELVAIVENQGKYYPFLRENKDKFEKILNFRIPYYVGPLARGNSKFAWLTRAGEGKITPYNFDEMIDKETSAEDFIKRMTINDLYLPTEPVLPKHSLLYERYTIFNELAGVRYVTENGEAKYFDAQTKRSIFELFKLDRKVSEKMVIKHLKVVMPAIRIQALKGLDNGKFNASYGTYKDLVDMGVAPELLNDEVNSEKWEDIIKTLTIFEGRKLIKRRLENYRDFLGEDILRKLSRKKYTGWGRLSAKLLDGIYDKKTHKTILDCLMTEDYSQNFMQLINDDTYSFKETIKNAQVIEKEETLAKTVQELPGSPAIKKGILQSLEIVDEIIKVMGYKPKSIVVEMARETQKTHGTRKREDRVQQIVKNLKDANELPKKLPSNAELSDERKYLYCLQNGRDMYTGAPLDYDHLQFYDVDHIIPQSFLKDDSIENKVLTIKKENVRKTNGLPSEAVIQKMGSFWKKLLDAGAMTNKKYDNLRRNLHGGLNEKLKERFIERQLVETRQITKYVAQLLDQRLNYDGNGVELDEKIAIVTLKAQLASQFRSEFKLRKVRALNNLHHAHDAYLNAVVANLIMAKYPELEPEFVYGKYRKTKFKGLGKATAKNTLYANVLYFLKENEVYPFWDKARDLPTIKRYLYRAQVNKVRKAERQTGGFSDEMLVPKSDSGKLLPRKEGLDPVKYGGYAKAVESYAVLITADEVKKGKTKKVKTLVNIPIIDSKKYEADPTAYLASRGYTNVTNSFILPKYSLLEDPEGRRRYLASFKEFQKANELILPQHLVELLYWVNAKDGEQKLEDHKAEFKELFDKIMEFADKYVVAPKNSEKIRRLYEENQDATPMELGKNFVELLRYTADGAASDFKFFGENIPRKRYNSAGSLLNGTLIYQSKTGLYETRIDLGKL

SEQ ID NO: 232 - protein, 1368 aa, Lactobacillus curvatus
MSRPYNIGLDIGTSSIGWSVVDDQSKLVSVRGKYGYGVRLYDEGQTAAERRSFRTTRRRLKRRKWRLGLLREIFEPYITPVDDTFFLRKKQSNLSPKDQRKLYPQTSLFNDRTDRAFYDDYPTIYHLRYKLMTEKRQFDIREIYLAMHHIVKYRGHFLNEAPVSSFKSSEINLVAHFDRLNTIFADLFSESGFQLETDKLAEVKALLLDNHQSASNRQRQALLLIYTPSTNKAVEKQNKAIATELLKAILGLKAKFNVLTGIEAEDVKTWTLTFNAENFDEEMVKLESSLDDNAHQIIESLQELYSGVLLAGIVPENQSLSQAMITKYDDHQKHLKMLKAVREALAPEDRQRLKQAYDQYVDGQENTKAYSKEDFYGDITKALKNNPDHPIVSEIKKLIELDQFMPKQRTKDNGAIPHQLHQQELDRIIENQQQYYPWLAELNPNSKRQTVAKYKLDELVAFRVPYYVGPLITAEQQQQSSDAKFAWMIRKAEGQITPWNFDDKVDRQASANEFIKRMTTTDTYLLAEDVLPKQSLIYQRFEVLNELNGLKIDDQPITTELKQAIFTDLFMQKTSVTVKNIQDYLVSEKRYASRPAITGLSDENKFNSRLSTYHDLKTIVGDAVDDVDKQADLEKCIEWSTIFEDGKIYSAKLNEIDWLTDQQRVQLAAKRYRGWGRLSAKLLTQIVNANGQRIMDLLWDTTDNFMRIVHSEDFDKLITEANQMMLAENDVQDVINDLYTSPQNKKALRQILLVVNDIQKAMKGQAPERILIEFAREDEVNPRLSVQRKRQVEQVYQNISNELLNNTEIRNELKDLSNSALSNTRLFLYFMQGGRDMYTGDSLNIDRLSTYDIDHILPQSFIKDNSLDNRVLVSQRMNRSKADQVPTDFTSVELGQKMQIQWEQMLRAGLITKKKYDNLTLNPDHISKYAMKGFINRQLVETRQVIKLATNLLMEQYGEDNIELITVKSGLTHQMRTEFDFPKNRNLNNHHHAFDAYLTAFVGLYLLKRYPKLKPYFVYGEYQKASQQDKWRNFNFLNGLKKDELVDENTEAVIWNKESGLAYLNKIYQFKKILVTREVHENSGALFNQTLYAAKDDKASGQGGKQLIPAKQDRPTALYGGYSGKTVAYMCIVRIKNKKGDLYKVCGVETSWLAQLKQLTDEDSKKAFLKQKISPQFTKVKKQKGTIVKVVEDFEVIAPHILINQRFFDNGQELTLGSATYKHNEQELILDKTAVKLLNGALPLTQSEELAEQVYDEILDQVMHYFPLYDTNQFRAKLSAGKAAFMKLPWKSQWDGNKMVQVGQQVILDRVLIGLHANAAVSDLGVLKISTPLGKMQQPSGISLSPDTQIIYQSPTGLFERRVALRDL

SEQ ID NO: 233 - protein, 1356 aa, Lactobacillus farciminis
MTKKEQPYNIGLDIGTGSVGWAVTNDNYDLLNIKKKNLWGVRLFEGAQTAKETRLNRSTRRRYRRRKNRINWLNEIFSEELANTDPSFLIRLQNSWVSKKDPDRKRDKYNLFIDNPYTDKEYYREFPTIFHLRKELIINKNKADIRLVYLALHNILKYRGNFTYEHQKFNISTLNSNLSKELIELNQQLIKYDISFPDNCDWNHISDILIGRGNATQKSSNILNNFTLDKETKKLLKEVINLILGNVAHLNTIFKTSLTKDEEKLSFSGKDIESKLDDLDSILDDDQFTVLDTANRIYSTITLNEILNGESYFSMAKVNQYENHAIDLCKLRDMWHTTKNEKAVGLSRQAYDDYINKPKYGTKELYTSLKKFLKVALPTNLAKEAEEKISKGTYLVKPRNSENGVVPYQLNKIEMEKIIDNQSQYYPFLKENKEKLLSILSFRIPYYVGPLQSSEKNPFAWMERKSNGHARPWNFDEIVDREKSSNKFIRRMTVTDSYLVGEPVLPKNSLIYQRYEVLNELNNIRITENLKTNPTGSRLTVETKQHIYNELFKNYKKITVKKLTKWLIAQGYYKNPILIGLSQKDEFNSTLTTYLDMKKIFGSSFMENNKNYNQIEELIEWLTIFEDKQILNEKLHSSNYSYTSDQIKKISNMRYKGWGRLSKKILTCITTETNTPKSLQLSNYSVLDLMWTTNNNFISIISNDKYDFKNYIENHNLNKNEDQNISNLVNDIHVSPALKRGITQSIKIVQEIVKFMGHAPKYIFIEVTRETKKSEITTSRGKRIQRLQSKLLNKANGFKPQLRKYLVPNEKIQEELKKHKNDLSSERIMLYFLQNGKSLYSEESLNINKLSDYQVDHILPRTYIPDDSLENKALVLAKENQRKADDLLLNSNVIDKNLERWTYMLNNNMMGLKKFKNLTRRVITDKDKLGFIHRQLVQTSQMVKGVANILNSMYKNQGTTCIQARANLSTAFRKALSDQDDRYHFKHPELVKNRNINDFHHAQDAYLASFLGTYRLRRFPTDEMLLMNGEYNKFYGQVKELYSKKKKLPDSRKNGFIISPLVNGTTQYDRNTGEIIWNVGFRDKILKIFNYHQCNVTRKTEIKTGQFYDQTIYSPKNPKYKKLIAQKKDMDPNIYGGFSGDNKSSITIVKIDNNKIKPVAIPIRLINDLKDKKTLQNWLEENVKHKKSIQIIKNNVPIGQIIYSKKVGLLSLNSDREIANRQQLILPPEHSALLRILQIPDEDPDQILAFYDKNILVEILQELITKMKKFYPFYKNEQEFLASNIENFNQATTSEKINSLEELITLLHANSTSAHLIFNNIEKKAFGRKTHGLTLNDTDFIYQSVTGLYETRIHIE

SEQ ID NO: 234 - protein, 1334 aa, Listeria innocua
MKKPYTIGLDIGTNSVGWAVLTDQYDLVKRKMKIAGDSEKKQIKKNFWGVRLFDEGQTAADRRMARTARRRIERRRNRISYLQGIFAEEMSKTDANFFCRLSDSFYVDNEKRNSRHPFFATIEEEVEYHKNYPTIYHLREELVNSSEKADLRLVYLALAHIIKYRGNFLIEGALDTQNTSVDGIYKQFIQTYNQVFASGIEDGSLKKLEDNKDVAKILVEKVTRKEKLERILKLYPGEKSAGMFAQFISLIVGSKGNFQKPFDLIEKSDIECAKDSYEEDLESLLALIGDEYAELFVAAKNAYSAVVLSSIITVAETETNAKLSASMIERFDTHEEDLGELKAFIKLHLPKHYEEIFSNTEKHGYAGYIDGKTKQADFYKYMKMTLENIEGADYFIAKIEKENFLRKQRTFDNGAIPHQLHLEELEAILHQQAKYYPFLKENYDKIKSLVTFRIPYFVGPLANGQSEFAWLTRKADGEIRPWNIEEKVDFGKSAVDFIEKMTNKDTYLPKENVLPKHSLCYQKYLVYNELTKVRYINDQGKTSYFSGQEKEQIFNDLFKQKRKVKKKDLELFLRNMSHVESPTIEGLEDSFNSSYSTYHDLLKVGIKQEILDNPVNTEMLENIVKILTVFEDKRMIKEQLQQFSDVLDGVVLKKLERRHYTGWGRLSAKLLMGIRDKQSHLTILDYLMNDDGLNRNLMQLINDSNLSFKSIIEKEQVTTADKDIQSIVADLAGSPAIKKGILQSLKIVDELVSVMGYPPQTIVVEMARENQTTGKGKNNSRPRYKSLEKAIKEFGSQILKEHPTDNQELRNNRLYLYYLQNGKDMYTGQDLDIHNLSNYDIDHIVPQSFITDNSIDNLVLTSSAGNREKGDDVPPLEIVRKRKVFWEKLYQGNLMSKRKFDYLTKAERGGLTEADKARFIHRQLVETRQITKNVANILHQRFNYEKDDHGNTMKQVRIVTLKSALVSQFRKQFQLYKVRDVNDYHHAHDAYLNGVVANTLLKVYPQLEPEFVYGDYHQFDWFKANKATAKKQFYTNIMLFFAQKDRIIDENGEILWDKKYLDTVKKVMSYRQMNIVKKTEIQKGEFSKATIKPKGNSSKLIPRKTNWDPMKYGGLDSPNMAYAVVIEYAKGKNKLVFEKKIIRVTIMERKAFEKDEKAFLEEQGYRQPKVLAKLPKYTLYECEEGRRRMLASANEAQKGNQQVLPNHLVTLLHHAANCEVSDGKSLDYIESNREMFAELLAHVSEFAKRYTLAEANLNKINQLFEQNKEGDIKAIAQSFVDLMAFNAMGAPASFKFFETTIERKRYNNLKELLNSTIIYQSITGLYESRKRLDD

SEQ ID NO: 235 - protein, 1334 aa, Listeria innocua
MKKPYTIGLDIGTNSVGWAVLTDQYDLVKRKMKIAGDSEKKQIKKNFWGVRLFDEGQTAADRRMARTARRRIERRRNRISYLQGIFAEEMSKTDANFFCRLSDSFYVDNEKRNSRHPFFATIEEEVEYHKNYPTIYHLREELVNSSEKADLRLVYLALAHIIKYRGNFLIEGALDTQNTSVDGIYKQFIQTYNQVFASGIEDGSLKKLEDNKDVAKILVEKVTRKEKLERILKLYPGEKSAGMFAQFISLIVGSKGNFQKPFDLIEKSDIECAKDSYEEDLESLLALIGDEYAELFVAAKNAYSAVVLSSIITVAETETNAKLSASMIERFDTHEEDLGELKAFIKLHLPKHYEEIFSNTEKHGYAGYIDGKTKQADFYKYMKMTLENIEGADYFIAKIEKENFLRKQRTFDNGAIPHQLHLEELEAILHQQAKYYPFLKENYDKIKSLVTFRIPYFVGPLANGQSEFAWLTRKADGEIRPWNIEEKVDFGKSAVDFIEKMTNKDTYLPKENVLPKHSLCYQKYLVYNELTKVRYINDQGKTSYFSGQEKEQIFNDLFKQKRKVKKKDLELFLRNMSHVESPTIEGLEDSFNSSYSTYHDLLKVGIKQEILDNPVNTEMLENIVKILTVFEDKRMIKEQLQQFSDVLDGVVLKKLERRHYTGWGRLSAKLLMGIRDKQSHLTILDYLMNDDGLNRNLMQLINDSNLSFKSIIEKEQVTTADKDIQSIVADLAGSPAIKKGILQSLKIVDELVSVMGYPPQTIVVEMARENQTTGKGKNNSRPRYKSLEKAIKEFGSQILKEHPTDNQELRNNRLYLYYLQNGKDMYTGQDLDIHNLSNYDIDHIVPQSFITDNSIDNLVLTSSAGNREKGDDVPPLEIVRKRKVFWEKLYQGNLMSKRKFDYLTKAERGGLTEADKARFIHRQLVETRQITKNVANILHQRFNYEKDDHGNTMKQVRIVTLKSALVSQFRKQFQLYKVRDVNDYHHAHDAYLNGVVANTLLKVYPQLEPEFVYGDYHQFDWFKANKATAKKQFYTNIMLFFAQKDRIIDENGEILWDKKYLDTVKKVMSYRQMNIVKKTEIQKGEFSKATIKPKGNSSKLISRKTNWDPMKYGGLDSPNMAYAVVIEYAKGKNKLVFEKKIIRVTIMERKAFEKDEKAFLEEQGYRQPKVLAKLPKYTLYECEEGRRRMLASANEAQKGNQQVLPNHLVTLLHHVANCEVSDGKSLDYIESNREMFAELLAHVSEFAKRYTLAEANLNKINQLFEQNKEGDIKAIAQSFVDLMAFNAMGAPASFKFFETTIERKRYNNLKELLNSTIIYQSITGLYESRKRLDD

SEQ ID NO: 236 - protein, 1337 aa, Listeria innocua
MKNMKKPYTIGLDIGTNSVGWAVLTDQYDLVKRKMKIAGDSEKKQIKKNFWGVRLFDEGQTAADRRMARTARRRIERRRNRISYLQGIFAEEMSKTDANFFCRLSDSFYVDNEKRNSRHPFFATIEEEVEYHKNYPTIYHLREELVNSSEKADLRLVYLALAHIIKYRGNFLIEGALDTQNTSVDGIYKQFIQTYNQVFASGIEDGSLKKLEDNKDVAKILVEKVTRKEKLERILKLYPGEKSAGMFAQFISLIVGSKGNFQKPFDLIEKSDIECAKDSYEEDLESLLALIGDEYAELFVAAKNAYSAVVLSSIITVAETETNAKLSASMIERFDTHEEDLGELKAFIKLHLPKHYEEIFSNTEKHGYAGYIDGKTKQADFYKYMKMTLENIEGADYFIAKIEKENFLRKQRTFDNGAIPHQLHLEELEAILHQQAKYYPFLKENYDKIKSLVTFRIPYFVGPLANGQSEFAWLTRKADGEIRPWNIEEKVDFGKSAVDFIEKMTNKDTYLPKENVLPKHSLCYQKYLVYNELTKVRYINDQGKTSYFSGQEKEQIFNDLFKQKRKVKKKDLELFLRNMSHVESPTIEGLEDSFNSSYSTYHDLLKVGIKQEILDNPVNTEMLENIVKILTVFEDKRMIKEQLQQFSDVLDGVVLKKLERRHYTGWGRLSAKLLMGIRDKQSHLTILDYLMNDDGLNRNLMQLINDSNLSFKSIIEKEQVTTADKDIQSIVADLAGSPAIKKGILQSLKIVDELVSVMGYPPQTIVVEMARENQTTGKGKNNSRPRYKSLEKAIKEFGSQILKEHPTDNQELRNNRLYLYYLQNGKDMYTGQDLDIHNLSNYDIDHIVPQSFITDNSIDNLVLTSSAGNREKGDDVPPLEIVRKRKVFWEKLYQGNLMSKRKFDYLTKAERGGLTEADKARFIHRQLVETRQITKNVANILHQRFNYEKDDHGNTMKQVRIVTLKSALVSQFRKQFQLYKVRDVNDYHHAHDAYLNGVVANTLLKVYPQLEPEFVYGDYHQFDWFKANKATAKKQFYTNIMLFFAQKDRIIDENGEILWDKKYLDTVKKVMSYRQMNIVKKTEIQKGEFSKATIKPKGNSSKLISRKTNWDPMKYGGLDSPNMAYAVVIEYAKGKNKLVFEKKIIRVTIMERKAFEKDEKAFLEEQGYRQPKVLAKLPKYTLYECEEGRRRMLASANEAQKGNQQVLPNHLVTLLHHVANCEVSDGKSLDYIESNREMFAELLAHVSEFAKRYTLAEANLNKINQLFEQNKEGDIKAIAQSFVDLMAFNAMGAPASFKFFETTIERKRYNNLKELLNSTIIYQSITGLYESRKRLDD

SEQ ID NO: 237 - protein, 1103 aa, Listeria innocua
LKLYPGEKSTGMFAQFISLIVGSKGNFQKPFDLIEKSDIECAKDSYEEDLESLLALIGDEYAELFVAAKNAYSAVVLSSIITVAETETNAKLSASMIERFDTHEEDLGELKAFIKLHLPKHYEEIFSNTEKHGYAGYIDGKTKQADFYKYMKTTLENIEGADYFIAKIEKENFLRKQRTFDNGAIPHQLHLEELEAILHQQAKYYPFLKENYDKIKSLVTFRIPYFVGPLANGQSEFAWLTRKADGEIRPWNIEEKVDFGKSAVDFIEKMTNKDTYLPKENVLPKHSLCYQKYLVYNELTKVRYINDQGKTSYFSGQEKEQIFNDLFKQKRKVKKKDLELFLRNMSHVESPTIEGLEDSFNSSYSTYHDLLKVGIKQEILDNPVNTEMLENIVKILTVFEDKRMIKEQLQQFSDVLDGVVLKKLERRHYTGWGRLSAKLLMGIRDKQSHLTILDYLMNDDGLNRNLMQLINDSNLSFKSIIEKEQVTTADKDIQSIVADLAGSPAIKKGILQSLKIVDELVSVMGYPPQTIVVEMARENQTTGKGKNNSRPRYKSLEKAIKEFGSQILKEHPTDNQELKNNRLYLYYLQNGKDMYTGQDLDIHNLSNYDIDHIVPQSFITDNSIDNLVLTSSAGNREKGNDVPPLEIVQKRKVFWEKLYQGNLMSKRKFDYLTKAERGGLTEADKARFIHRQLVETRQITKNVANILHQRFNYGKDDHGNTMKQVRIVTLKSALVSQFRKQFQLYKVRGVNDYHHAHDAYLNGVVANTLLKVYPQLEPEFVYGDYHQFDWFKANKATAKKQFYTNIMLFFAQKDRIIDENGEILWDKKYLDTVKKVMSYRQMNIVKKTEIQKGEFSKATIKPKGNSSKLIPRKTNWDPMKYGGLDSPNMAYAVVIEYAKGKNKLVFEKKIIRVTIMERKAFEKDEKAFLEEQGYRQPKVLAKLPKYTLYECEEGRRRMLASANEAQKGNQQVLPNHLVTLLHHAANCEVSDGKSLDYIESNREMFAELLAHVSEFAKRYTLAEANLNKINQLFEQNKEGDIKAIAQSFVDLMAFNAMGAPASFKFFETTIERKRYNNLKELLNSTIIYQSITGLYESRKRLDD

SEQ ID NO: 238 - protein, 1334 aa, Listeria ivanovii
MRKPYTIGLDIGTNSVGWAVLTDQYNLVKRKMKVAGSAEKKQIKKNFWGVRLFDEGEVAAGRRMNRTTRRRIERRRNRIAYLQEIFAAEMAEVDANFFYRLEDSFYIESEKRHSRHPFFATIEEEVAYHEEYKTIYHLREKLVNSSDKADLRLVYLALAHIIKYRGNFLIEGMLDTKNTSVDEVFKQFIQTYNQIFASDIEEGSLTRLEENKEVAEILSEKLTRREKLDKILKLYTGEKSTGMFARFINLIIGSKGDFKKVFDLDEKAEIECAKDTYEEDLEALLAKIGDEYAEIFVAAKSTYNAVVLSNIITVTDTETKAKLSASMIERFDKHAKDLKRLKAFFKMQLPEKFNEVFNDIEKDGYAGYIDGKTTQEKFYKYMKKMLANIDGADYFIDQIEEENFLRKQRTFDNGTIPHQLHLEELEAILHQQAKYYPFLRKDYEKIRSLVTFRIPYFIGPLANGQSDFAWLTRKADGEIRPWNIEEKVDFGKSAIDFIEKMTNKDTYLPKENVLPKHSLCYQKYMVYNELTKIRYIDDQGKTHHFSGQEKQQIFNGLFKQQRKVKKKDLERFLYTINHIESPTIEGVEDAFNSSFATYHDLQKGGVTQEILDNPLNADMLEEIVKILTVFEDKRMIKEQLQSFSDVLDGTILKKLERRHYTGWGRLSAKLLTGIRDKHSHLTILDYLMNDDGLNRNLMQLINDSNLSFKSIIEKEQVSTADKGIQSIVAELAGSPAIKKGILQSLKIVDELVGIMGYPPQTIVVEMARENQTTGKGKNNSKPRFISLEKAIKEFGSQILKEHPTDNQCLKNDRLYLYYLQNGKDMYTGKELDIHNLSNYDIDHIIPQSFITDNSIDNRVLVSSTANREKGDNVPLLEVVRKRKAFWEKLYQAKLMSKRKFDYLTKAERGGLTEADKANFIQRQLVETRQITKNVANILYQRFNCKQDENGNEVEQVRIVTLKSTLVSQFRKQFQLYKVREVNDYHHAHDAYLNGVVANTLLKVYPQLEPEFVYGDYHQFDWFKANKATAKKQFYTNIMRFFAKENQIIDKNGEILWDNRYLDTIKKVLSYRQMNIVKKTEIQKGEFSNATVNPKGNSSKLISRKADWNPIKYGGFDGSNMAYSIVIEYEKRKKKTVIKKELIQINIMERVAFEKDQKAFLEEKGYYSPKVLTKIPKYTLYECENGRRRMLGSANEAQKGNQMVLPNHLMTLLYHAKNCEANDGESLAYIEMHREMFAELLAYISEFAKRYTLANDRLEKINMFFEQNKKGDIKVIAKSFDKLKVFNAFGAPRDFEFFETTIKRKRYYNIKELLNATIIYQSITGLYEARKRLED

SEQ ID NO: 239 - protein, 953 aa, Listeria ivanovii
MKKMLANIDGADYFIDQIEEENFLRKQRTFDNGTIPHQLHLEELEAILHQQAKYYPFLRKDYEKIRSLVTFRIPYFIGPLANGQSDFAWLTRKADGEIRPWNIEEKVDFGKSAIDFIEKMTNKDTYLPKENVLPKHSLCYQKYMVYNELTKIRYIDDQGKTHHFSGQEKQQIFNGLFKQQRKVKKKDLERFLYTINHIESPTIEGVEDAFNSSFATYHDLQKGGVTQEILDNPLNADMLEEIVKILTVFEDKRMIKEQLQSFSDVLDGTILKKLERRHYTGWGRLSAKLLTGIRDKHSHLTILDYLMNDDGLNRNLMQLINDSNLSFKSIIEKEQVSTADKGIQSIVAELAGSPAIKKGILQSLKIVDELVGIMGYPPQTIVVEMARENQTTGKGKNNSKPRFISLEKAIKEFGSQILKEHPTDNQCLKNDRLYLYYLQNGKDMYTGKELDIHNLSNYDIDHIIPQSFITDNSIDNRVLVSSTANREKGDNVPLLEVVRKRKAFWEKLYQAKLMSKRKFDYLTKAERGGLTEADKANFIQRQLVETRQITKNVANILYQRFNCKQDENGNEVEQVRIVTLKSTLVSQFRKQFQLYKVREVNDYHHAHDAYLNGVVANTLLKVYPQLEPEFVYGDYHQFDWFKANKATAKKQFYTNIMRFFAKENQIIDKNGEILWDNRYLDTIKKVLSYRQMNIVKKTEIQKGEFSNATVNPKGNSSKLISRKADWNPIKYGGFDGSNMAYSIVIEYEKRKKKTVIKKELIQINIMERVAFEKDQKAFLEEKGYYSPKVLTKIPKYTLYECENGRRRMLGSANEAQKGNQMVLPNHLMTLLYHAKNCEANDGESLAYIEMHREMFAELLAYISEFAKRYTLANDRLEKINMFFEQNKKGDIKVIAKSFDKLKVFNAFGAPRDFEFFETTIKRKRYYNIKELLNATIIYQSITGLYEARKRLED

SEQ ID NO: 240 - protein, 1334 aa, Listeria monocytogenes
MKNPYTIGLDIGTNSVGWAVLTNQYDLVKRKMKVAGNSDKKQIKKNFWGVRLFDDGQTAVDRRMNRTARRRIERRRNRISYLQEIFAVEMANIDANFFCRLNDSFYVDSEKRNSRHPFFATIEEEVAYHDNYRTIYHLREKLVNSSEKADLRLVYLALAHIIKYRGNFLIEGALDTKNTSVDEVYKQFIETYNQVFMSNIEEGALAKVEENIEVANILAGKFTRREKFERILQLYPGEKSTGMFAQFISLIVGSKGNFQKVFDLIEKTDIECAKDSYEEDLETLLAIIGDEYAELFVAAKNTYNAVVLSSIITVTDTETNAKLSASMIERFDAHEKDLVELKAFIKLNLPKQYEEIFSNAAIDGYAGYIDGKTKQVDFYKYLKTILENIEGSDYFIAKIEEENFLRKQRTFDNGAIPHQLHLEELEAIIHQQAKYYPFLKEDYDKIKSLVTFRIPYFVGPLANGQSEFAWLTRKADGEIRPWNIEEKVDFGKSAVDFIEKMTNKDTYLPKENVLPKHSLCYQKYMVYNELTKIRYIDDQGKTNYFSGREKQQVFNDLFKQKRKVKKKDLELFLRNINHIESPTIEGLEDSFNASYATYHDLLKVGMKQEILDNPLNTEMLEDIVKILTVFEDKPMIKEQLQQFSDVLDGGVLKKLERRHYTGWGRLSAKLLVGIREKQSHLTILDYLMNDDGLNRNLMQLINDSNLSFKSIIEKEQVSTTDKDLQSIVAELAGSPAIKKGILQSLKIVDELVSIMGYPPQTIVVEMARENQTTGKGKNNSKPRYKSLEKAIKEFGSQILKEHPTDNQELKNNRLYLYYLQNGKDMYTGQELDIHNLSNYDIDHIVPQSFITDNSIDNLVLTSSAGNREKGGDVPPLEIVRKRKVFWEKLYQGNLMSKRKFDYLTKAERGGLTEADKARFIHRQLVETRQITKNVANILYQRFNKETDNHGNTMEQVRIVTLKSALVSQFRKQFQLYKVREVNGYHHAHDAYLNGVVANTLLKVYPQLEPEFVYGEYHQFDWFKANKATAKKQFYTNIMLFFAQKERIIDENGEILWDKKYLETIKKVLDYRQMNIVKKTEIQKGEFSKATIKPKGNSSKLIPRKENWDPMKYGGLDSPNMAYAVIIEHAKGKKKIVIEKKLIQINIMERKMFEKDEEAFLEEKGYRHPKVLTKLPKYTLYECEKGRRRMLASANEAQKGNQLVLSNHLVSLLYHAKNCEASDGKSLKYIEAHRETFSELLAQVSEFATRYTLADANLSKINNLFEQNKEGDIKAIAQSFVDLMAFNAMGAPASFKFFEATIDRKRYTNLKELLSSTIIYQSITGLYESRKRLDD

SEQ ID NO: 241 - protein, 1334 aa, Listeria monocytogenes
MKNPYTIGLDIGTNSVGWAVLTDQYDLVKRKMKVAGNSDKKQIKKNFWGVRLFDDGQTAVDRRMNRTARRRIERRRNRISYLQEIFAVEMANIDANFFCRLNDSFYVDSEKRNSRHPFFATIEEEVAYHKNYRTIYHLREELVNSSEKADLRLVYLALAHIIKYRGNFLIEGALDTKNTSVDEVYKQFIQTYNQVFMSNIEEGALAKVEENTEVASILAGKFTRREKFERILRLYPGEKSTGMFAQFISLIVGNKGNFQKVFNLVEKTDIECAKDSYEEDLEALLAIIGDEYAELFVAAKNTYNAVVLSSIITVTATETNAKLSASMIERFDAHEKELGELKAFIKLHLPKQYQEIFNNAEIDGYAGYIDGKTKQVDFYKYLKTTLENVEGADYFITKIEEENFLRKQRTFDNGVIPHQLHLEELEAILHQQAKYYPFLREGYDKIKSLVTFRIPYFVGPLANGQSEFAWLTRKDDGEIRPWNIEEKVDFGKSAVDFIEKMTNKDTYLPKENVLPKHSLCYQKYMVYNELTKIRYIDDQGKTNYFSGREKQQIFNDLFKQKRKVKKKDLELFLRNINHIESPTIEGLEDSFNASYATYHDLLKVGLKQEILDNPLNTEILEDIVKILTVFEDKRMIKEQLEQFSDVLDGVVLKKLERRHYTGWGRLSAKLLVGIRDKQSHLTILDYLMNDDGLNRNLMQLINDSNLSFKSIIEKEQVSTTDKDLQSIVADLAGSPAIKKGILQSLKIVDELVSIMGYPPQTIVVEMARENQTTGKGKNNSKPRYKSLEKAIKDFGSQILKEHPTDNQELKNNRLYLYYLQNGKDIYTGQELDIHNLSNYDIDHIVPQSFITDNSIDNLVLTSSAGNREKGGDVPPLEIVRKRKVFWEKLYQGNLMSKRKFDYLTKAERGGLTEADKARFIHRQLVETRQITKNVANILHQRFNKETDNHGNTMEQVRIVTLKSALVSQFRKQFQLYKVREVNDYHHAHDAYLNGVVANTLLKVYPQLEPEFVYGEYHQFDWFKANKATAKKQFYTNIMLFFAQKERIIDENGEILWDKKYLETIKKVLDYRQINIVKKTEIQKGEFSKATIKPKGNSSKLIPRKENWDPMKYGGLDSPNMAYAVIIEHAKGKKKIVIEKKLIQINIMERKMFEKDEEAFLEEKGYHQPKVLTKLPKYTLYECEKGRRRMLSSANEAQKGNQLVLSNHLVSLLYHAKNCEASDGKSLKYIEAHRETFSELLAQVSEFATKYTLADANLSKINNLFEQNKEGDIKAIAQSFVDLMAFNAMGAPASFKFFEATIDRKRYTNLKELLSSTIIYQSITGLYESRKRLDD

SEQ ID NO: 242 - protein, 1334 aa, Listeria monocytogenes
MKNPYTIGLDIGTNSVGWAVLTDQYDLVKRKMKVAGNSDKKQIKKNFWGVRLFDDGQTAVDRRMNRTARRRIERRRNRISYLQEIFAVEMANIDANFFCRLNDSFYVDSEKRNSRHPFFATIEEEVAYHKNYRTIYHLREELVNSSEKADLRLVYLALAHIIKYRGNFLIEGALDTKNTSVDEVYKQFIQTYNQVFMSNIEEGALAKVEENTEVASILAGKFTRREKFERILRLYPGEKSTGMFAQFISLIVGNKGNFQKVFNLVEKTDIECAKDSYEEDLEALLAIIGDEYAELFVAAKNTYNAVVLSSIITVTATETNAKLSASMIERFDAHEKELGELKAFIKLHLPKQYQEIFNNAEIDGYAGYIDGKTKQVDFYKYLKTTLENVEGADYFITKIEEENFLRKQRTFDNGVIPHQLHLEELEAILHQQAKYYPFLREGYDKIKSLVTFRIPYFVGPLANGQSEFAWLTRKDDGEIRPWNIEEKVDFGKSAVDFIEKMTNKDTYLPKENVLPKHSLCYQKYMVYNELTKIRYIDDQGKTNYFSGREKQQIFNDLFKQKRKVKKKDLELFLRNINHIESPTIEGLEDSFNASYATYHDLLKVGLKQEILDNPLNTEILEDIVKILTVFEDKRMIKEQLEQFSDVLDGVVLKKLERRHYTGWGRLSAKLLVGIRDKQSHLTILDYLMNDDGLNRNLMQLINDSNLSFKSIIEKEQVSTTDKDLQSIVADLAGSPAIKKGILQSLKIVDELVSIMGYPPQTIVVEMARENQTTGKGKNNSKPRYKSLEKAIKDFGSQILKEHPTDNQELKNNRLYLYYLQNGKDIYTGQELDIHNLSNYDIDHIVPQSFITDNSIDNLVLTSSAGNREKGGDVPPLEIVRKRKVFWEKLYQGNLMSKRKFDYLTKAERGGLTEADKARFIHRQLVETRQITKNVANILHQRFNKETDNHGNTMEQVRIVTLKSALVSQFRKQFQLYKVREVNDYHHAHDAYLNGVVANTLLKVYPQLEPEFVYGEYHQFDWFKANKATAKKQFYTNIMLFFAQKERIIDENGEILWDKKYLETIKKVLDYRQINIVKKTEIQKGEFSKATIKPKGNSSKLIPRKENWDPVKYGGLDSPNMAYAVIIEHAKGKKKIVIEKKLIQINIMERKMFEKDEEAFLEEKGYHQPKVLTKLPKYTLYECEKGRRRMLSSANEAQKGNQLVLSNHLVSLLYHAKNCEASDGKSLKYIEAHRETFSELLAQVSEFATKYTLADANLSKINNLFEQNKEGDIKAIAQSFVDLMAFNAMGAPASFKFFEATIDRKRYTNLKELLSSTIIYQSITGLYESRKRLDD

SEQ ID NO: 243 - protein, 1334 aa, Listeria monocytogenes
MKKPYTIGLDIGTNSVGWAVLTDQYDLVKRKMKISGDSEKKQIKKNFWGVRLFEKGETAAKRRMSRTARRRIERRRNRISYLQEIFAIQMNEVDDNFFNRLKESFYAESDKKYNRHPFFGTVEEEVAYYKDFPTIYHLRKELIDSQKKADLRLVYLALAHIIKYRGHFLIEGALDTKNTSIDEMFKQFLQIYNQVFANDIEEASLKKTEKNQEVAQILAEKFTRKDKLDKILSLYPGEKTTGVFAQFVNIIVGSTGKFKKHFNLHEKKDINCAEDTYDTDLESLLAIIGDEFAEVFVAAKNAYNAVVLSNIITVTDSTTRAKLSASLIERFENHKEDLKKMKRFVRTYLPEKYDEIFDDTEKHGYAGYISGKTKQADFYKYMKATLEKIEGADYFIAKIEEENFLRKQRTFDNGVIPHQLHLEELEAILHQQAKYYPFLREDYEKIKSLVTFRIPYFVGPLAKGQSEFAWLTRKADGEIRPWNIEEKVDFGKSAVDFIEKMTNKDTYLPKENVLPKHSLCYQKYMVYNELTKVRYIDDQGKTNYFSGQEKQQIFNDLFKQKRKVKKKDLELFLRNINQIESPTIEGLEDSFNASYATYHDLLKVGMKQEILDNPLNTEMLEDIVKILTVFEDKRMIKEQLQQFSDVLDGTVLKKLERRHYTGWGRLSAKLLVGIRDKQSHLTILDYLMNDDGLNRNLMQLINDSNLSFKSIIEKEQVSTTDKDLQSIVAELAGSPAIKKGILQSLKIVDELVSVMGYPPQTIVVEMARENQTTNKGKNNSKPRYKSLEKAIKEFGSQILKEHPTDNQELKNNRLYLYYLQNGKDMYTGQELDIHNLSNYDIDHIVPQSFITDNSVDNLVLTSSAGNREKGDNVPPLEIVQKRKIFWEKLYQGNLMSKRKFDYLTKAERGGLTEADKARFIHRQLVETRQITKNVANILHQRFNYKTDGNKDTMETVRIVTLKSALVSQFRKQFQFYKVREVNDYHHAHDAYLNGVVANTLLKVYPQLEPEFVYGEYHQFGWFKANKATAKKQFYTNIMLFFAQKDRIIDENGEILWDKRYLETVKKVLGYRQMNIVKKTEIQKGEFSNVTPNPKGKSNKLIPRKKDWDPIKYGGFDGSKMAYAIIIEYEKQKRKVRIEKKLIQINIMEREAFEKDEKTFLEEKGYHQPKVLIKVPKYTLYECKNGRRRMLGSANEAHKGNQMLLPNHLMALLYHAEKYEAIDGESLAYIEVHRALFDELLAYISEFARKYTLSNDRLDEINMLYERNKDGDVKSIAESFVSLKKFNAFGVHQDFSFFGTKIERKRDRKLNELLNSTIIYQSITGLYESRKRLDN

SEQ ID NO: 244 - protein, 1334 aa, Listeria monocytogenes
MKNPYTIGLDIGTNSVGWAVLTDQYDLVKRKMKVAGNSDKKQIKKNFWGVRLFDEGETAADRRMNRTARRRIERRRNRISYLQEIFALEMANIDANFFCRLNDSFYVDSEKRNSRHPFFATIEEEVAYHKNYRTIYHLREELVNSSEKADLRLVYLALAHIIKYRGNFLIEGALDTKNTSVDGVYKQFIQTYNQVFISNIEEGTLAKMEENTTVADILAGKFTRKEKLERILQLYPGEKSTGMFAQFISLIVGSKGNFQKVFDLVEKTDIECAKDSYEEDLEALLAIIGDEYAELFVAAKNTYNAVVLSSIITVTDTETNAKLSASMIERFDAHEKDLSELKAFIKLHLPKQYEEIFSNVAIDGYAGYIDGKTKQVDFYKYLKTLLENIEGADYFIAKIEEENFLRKQRTFDNGAIPHQLHLEELEAILHQQAKYYPFLKEAYDKIKSLVTFRIPYFVGPLANGQSDFAWLTRKADGEIRPWNIEEKVDFGKSAVDFIEKMTNKDTYLPKENVLPKHSLYYQKYMVYNELTKVRYIDDQGKTNYFSGQEKQQIFNDYFKQKRKVSKKDLEQFLRNMSHIESPTIEGLEDSFNSSYATYHDLLKVGIKQEVLENPLNTEMLEDIVKILTVFEDKRMIKEQLQQFSDVLDGAVLKKLERRHYTGWGRLSAKLLVGIRDKQSHLTILDYLMNDDGLNRNLMQLINDSNLSFKSIIEKEQVSTTDKDLQSIVADLAGSPAIKKGILQSLKIVDELVSIMGYPPQTIVVEMARENQTTVKGKNNSRPRYKSLEKAIKEFGSQILKEHPTDNQELRNNRLYLYYLQNGKDMYTGQELDIHNLSNYDIDHIVPQSFITDNSIDNLVLTSSAGNREKGDDVPPLEIVRKRKVFWEKLFQGNLMSKRKFDYLTKAERGGLTEADKATFIHRQLVETRQITKNVANILHQRFNNETDNHGNNMEQVRIVMLKSALVSQFRKQFQLYKVREVNDYHHAHDAYLNGVVANTLLKVYPQLEPEFVYGEYHQFDWFKANKATAKKQFYTNIMLFFAQKERIIDENGEILWDKKYLETIKKVLDYRQMNIVKKTEIQKGEFSKATIKPKGNSSKLIPRKENWDPMKYGGLDSPNMAYAVIIEHAKGKKKVVFEKKIIRITIMERKAFEKDEKSFLEKQGYRQPKVLTKLPKYTLYECENGRRRMLASANEAQKGNQQVLKGQLITLLHHAKNCEASDGKSLDYIESNREMFGELLAHVSEFAKRYTLADANLSKINQLFEQNKDNDIKVIAQSFVNLMAFNAMGAPASFKFFEATIERKRYTNLKELLSATIIYQSITGLYEARKRLDG

SEQ ID NO: 245 - protein, 1334 aa, Listeria monocytogenes
MKNPYTIGLDIGTNSVGWAVLTNQYDLVKRKMKVAGNSDKKQIKKNFWGVRLFDDGQTAVDRRMNRTARRRIERRRNRISYLQEIFAVEMANIDANFFCRLNDSFYVDSEKRNSRHPFFATIEEEVAYHKNYRTIYHLREELVNSSEKADLRLVYLALAHIIKYRGNFLIEGALDTKNTSVDGVYEQFIQTYNQVFMSNIEEGTLAKVEENIEVANILAGKFTRREKFERILQLYPGEKSTGMFAQFISLIVGSKGNFQKVFDLIEKTDIECAKDSYEEDLEALLAIIGDEYAELFVAAKNTYNAVVLSSIITVTATETNAKLSASMIERFDAHEKDLGELKAFIKLHLPKQYQEIFNNAAIDGYAGYIDGKTKQVDFYKYLKTILENIEGADYFIAKIEEENFLRKQRTFDNGAIPHQLHLEELEAIIHQQAKYYPFLREDYEKIKSLVTFRIPYFVGPLAKGQSEFAWLTRKADGEIRPWNIEEKVDFGKSAVDFIEKMTNKDTYLPKENVLPKHSLCYQKYMVYNELTKVRYIDDQGKTNYFSGQEKQQIFNDLFKQKRKVKKKDLELFLRNINHIESPTIEGLEDSFNASYATYHDLLKVGMKQEILDNPLNTEMLEDIVKILTVFEDKPMIKEQLQQFSDVLDGGVLKKLERRHYTGWGRLSAKLLVGIREKQSHLTILDYLMNDDGLNRNLMQLINDSNLSFKSIIEKEQVSTTDKDLQSIVADLAGSPAIKKGILQSLKIVDELVSIMGYPPQTIVVEMARENQTTGKGKNNSKPRYKSLEKAIKEFGSKILKEHPTDNQELKNNRLYLYYLQNGKDMYTGQELDIHNLSNYDIDHIVPQSFITDNSIDNLVLTSSAGNREKGGDVPPLEIVRKRKVFWEKLYQGNLMSKRKFDYLTKAERGGLTDADKARFIHRQLVETRQITKNVANILHQRFNNETDNHGNTMEQVRIVTLKSALVSQFRKQFQLYKVREVNDYHHAHDAYLNGVVANTLLKVYPQLEPEFVYGEYHQFDWFKANKATAKKQFYTNIMLFFGQKERIIDENGEILWDKKYLETIKKVLDYRQMNIVKKTEIQKGEFSKATIKPKGNSSKLIPRKENWDPMKYGGLDSPNMAYAVIIEHAKGKKKLIFEKKIIRITIMERKMFEKDEEAFLEEKGYRHPKVLTKLPKYTLYECEKGRRRMLASANEAQKGNQLVLSNHLVSLLYHAKNCEASDGKSLKYIEAHRETFSELLAQVSEFATRYTLADANLSKINNLFEQNKEGDIQAIAQSFVDLMAFNAMGAPASFKFFEATIDRKRYTNLKELLSSTIIYQSITGLYESRKRLDD

SEQ ID NO: 246 - protein, 1334 aa, Listeria monocytogenes
MKNPYTIGLDIGTNSVGWAVLTNQYDLVKRKMKVAGNSDKKQIKKNFWGVRLFDDGQTAVDRRMNRTARRRIERRRNRISYLQEIFAVEMANIDANFFCRLNDSFYVDSEKRNSRHPFFATIEEEVAYHKNYRTIYHLREELVNSSEKADLRLVYLALAHIIKYRGNFLIEGALDTKNTSVDGVYEQFILTYNQVFMSNIEEGTLAKVEENIEVANILAGKFTRREKFERILQLYPGEKSTGMFAQFISLIVGSKGNFQKVFDLIEKTDIECAKDSYEEDLETLLAIIGDEYAELFVAAKNTYNAVVLSSIITVTDTETNAKLSASMIERFDAHEKDLVELKAFIKLNLPKQYEEIFSNAAIDGYAGYIDGKTKQVDFYKYLKTTLENVEGADYFITKIEEENFLRKQRTFDNGVIPHQLHLEELEAILHQQAKYYPFLREDYEKIKSLVTFRIPYFVGPLAKGQSEFAWLTRKADGEIRPWNIEEKVDFGKSAVDFIEKMTNKDTYLPKENVLPKHSLCYQKYMVYNELTKIRYIDDQGKTNYFSGQEKQQIFNDLFKQKRKVKKKDLELFLRNINHVESPTIEGLEDSFNASYATYHDLMKVGIKQEILDNPLNTEMLEDIVKILTVFEDKRMIKEQLQQFSDVLDGTVLKKLERRHYTGWGRLSAKLLVGIRDKQSHLTILDYLMNDDGLNRNLMQLINDSNLSFKSIIEKEQVSTADKDLQSIVADLAGSPAIKKGILQSLKVVEELVSVMGYPPQTIVVEMARENQTTNKGKNNSKPRYKSLEKAIKEFGSQILKEHPTDNQELKNNRLYLYYLQNGKDMYTGQELDIHNLSNYDIDHIVPQSFITDNSIDNLVLTSSAGNREKGDNVPPLEIVQKRKIFWEKLYQGNLMSKRKFDYLTKAERGGLTEADKARFIHRQLVETRQITKNVANILHQRFNYKTDDNEDTMEPVRIVTLKSALVSQFRKQFQLYKVREVNDYHHAHDAYLNGVVANTLLKVYPQLEPEFVYGEYHQFDWFKANKATAKKQFYTNIMLFFAQKERIIDENGEILWDKKYLETIKKVLNYRQMNIVKKTEIQKGEFSNQNPKPRGDSSKLIPKKTNLNPIKYGGFEGSNMAYAIIIEHEKRKKKVTIEKKLIQINIMERKAFEKDEKVFLEGKGYHQPKVLTKLPKYALYECENGRRRMLGSANEVHKGNQMLLPNHLMTLLYHAEKREAIDGESLAYIEAHKAVFGELLAHISEFARKYTLANDKLDEINMLYERNKDGDVKSIAESFVSLKKFNAFGVHKDFNFFGTTIKRKRDRKLKELLNSTIIYQSITGLYESRKRLDS

SEQ ID NO: 247 - protein, 1334 aa, Listeria monocytogenes
MKNPYTIGLDIGTNSVGWAVLTDQYDLVKRKMKVAGNSDKKQIKKNFWGVRLFDDGQTAVDRRMNRTARRRIERRRNRISYLQEIFAVEMANIDANFFCRLNDSFYVDSEKRNSRHPFFATIEEEVAYHKNYRTIYHLREELVNSSEKADLRLVYLALAHIIKYRGNFLIEGALDTKNTSVDGVYEQFIQTYNQVFMSNIEEGTLAKVEENIEVANILAGKFTRREKFERILQLYPGEKSTGMFAQFISLIVGSKGNFQKVFDLIEKTDIECAKDSYEEDLETLLAIIGDEYAELFVAAKNTYNAVVLSSIITVNDTETNAKLSASMIERFDAHEKDLVELKAFIKLNLPKQYEEIFSNAAIDGYAGYIDGKTKQVDFYKYLKTILENIEGSDYFIAKIEEENFLRKQRTFDNGAIPHQLHLEELEAIIHQQAKYYTFLKEDYDKIKSLVTFRIPYFVGPLANGQSEFAWLTRKADGEIRPWNIEEKVDFGKSAVDFIEKMTNKDTYLPKENVLPKHSLCYQKYMVYNELTKVRYIDDQGKTNYFSGQEKQQIFNDLFKQKRKVKKKDLELFLRNINQIESPTIEGLEDSFNASYATYHDLLKVGMKQEILDNPLNTEMLEDIVKILTVFEDKRMIKEQLQQFSDVLDGVVLKKLERRHYTGWGRLSAKLLVGIRDKQSHLTILEYLMNDDGLNRNLMQLINDSNLSFKSIIEKEQVSTTDKDLQSIVAELAGSPAIKKGILQSLKIVDELVSIMGYPPQTIVVEMARENQTTGKGKNNSKPRYKSLEKAIKEFGSQILKEHPTDNQELKNNRLYLYYLQNGKDMYTGQELDIHNLSNYDIDHIVPQSFITDNSIDNLVLTSSAGNREKGGDVPPLEIVRKRKVFWEKLYQGNLMSKRKFDYLTKAERGGLTEADKARFIHRQLVETRQITKNVANILHQRFNKETDNHGNTMEQVRIVTLKSALVSQFRKQFQLYKVREVNDYHHAHDAYLNGVVANTLLKVYPQLEPEFVYGEYHQFDWFKANKATAKKQFYTNIMLFFAQKERIIDENGEILWDKKYLETIKKVLDYRQMNIVKKTEIQKGEFSKATIKPKGNSSKLIPRKENWDPMKYGGLDSPNMAYAVIIEHAKGKKRIVIEKKLIQINIMERKMFEKDEEAFLEEKGYRHPKVLTKLPKYTLYECEKGRRRMLASANEAQKGNQLVLSNHLVSLLYHAKNCEASDGKSLKYIEAHRETFSELLAQVSEFATRYTLADANLSKINNLFEQNKEGDIKAIAQSFVDLMAFNAMGAPASFKFFEATIDRKRYTNLKELLSSTIIYQSITGLYESRKRLDD

SEQ ID NO: 248 - protein, 1334 aa, Listeria monocytogenes
MKKPYTIGLDIGTNSVGWAVLTDQYDLVKRKMKISGDSEKKQIKKNFWGVRLFEKGETAAKRRMSRTARRRIERRRNRISYLQEIFAIQMNEVDDNFFNRLKESFYAESDKKYNRHPFFGTVEEEVAYYKDFPTIYHLRKELIDSQKKADLRLVYLALAHIIKYRGHFLIEGALDTKNTSIDEMFKQFLQIYNQVFANDIEEASLKKTEKNQEVAQILAEKFTRKDKLDKILSLYPGEKTTGVFAQFVNIIVGSTGKFKKHFNLHEKKDINCAEDTYDTDLESLLAIIGDEFAEVFVAAKNAYNAVVLSNIITVTDSTTRAKLSASLIERFENHKEDLKKMKRFVRTYLPEKYDEIFDDTEKHGYAGYISGKTKQADFYKYMKATLEKIEGADYFIAKIEEENFLRKQRTFDNGVIPHQLHLEELEAILHQQAKYYPFLREDYEKIKSLVTFRIPYFVGPLAKGQSEFAWLTRKADGEIRPWNIEEKVDFGKSAVDFIEKMTNKDTYLPKENVLPKHSLCYQKYMVYNELTKVRYIDDQGKTNYFSGQEKQQIFNDLFKQKRKVKKKDLELFLRNINQIESPTIEGLEDSFNASYATYHDLLKVGMKQEILDNPLNTEMLEDIVKILTVFEDKRMIKEQLQQFSDVLDGTVLKKLERRHYTGWGRLSAKLLVGIRDKQSHLTILDYLMNDDGLNRNLMQLINDSNLSFKSIIEKEQVSTADKDLQSIVADLAGSPAIKKGILQSLKIVDELVSVMGYPPQTIVVEMARENQTTNKGKNNSKPRYKSLEKAIKEFGSQILKEHPTDNQELKNNRLYLYYLQNGKDMYTGQELDIHNLSNYDIDHIVPQSFITDNSVDNLVLTSSAGNREKGDNVPPLEIVQKRKIFWEKLYQGNLMSKRKFDYLTKAERGGLTEADKARFIHRQLVETRQITKNVANILHQRFNYKTDGNKDTMETVRIVTLKSALVSQFRKQFQFYKVREVNDYHHAHDAYLNGVVANTLLKVYPQLEPEFVYGEYHQFDWFKANKATAKKQFYTNIMLFFAQKDRIIDENGEILWDKRYLETVKKVLGYRQMNIVKKTEIQKGEFSNVTPNPKGKSNKLIPRKKDWDPIKYGGFDGSKMAYAIIIEYEKQKRKVRIEKKLIQINIMEREAFEKDEKTFLEEKGYHQPKVLIKVPKYTLYECENGRRRMLGSANEAHKGNQMLLPNHLMALLYHAEKYEAIDGESLAYIEVHRALFDELLAYISEFARKYTLSNDRLDEINMLYERNKDGDVKSIAESFVSLKKFNAFGVHQDFSFFGTKIERKRDRKLNELLNSTIIYQSITGLYESRKRLDN

SEQ ID NO: 249 - protein, 1334 aa, Listeria monocytogenes
MKNPYTIGLDIGTNSVGWAVLTNQYDLVKRKMKVAGNSDKKQIKKNFWGVRLFDDGQTAVDRRMNRTARRRIERRRNRISYLQEIFAVEMANIDANFFCRLNDSFYVDSEKRNSRHPFFATIEEEVAYHKNYRTIYHLREELVNSSEKADLRLVYLALAHIIKYRGNFLIEGALDTKNTSVDGVYEQFIQTYNQVFMSNIEEGTLAKVEENIEVANILARKFTRREKFERILQLYPGEKSTGMFAQFISLIVGSKGNFQKVFDLIEKTDIECAKDSYEEDLETLLAIIGDEYAELFVAAKNTYNAVVLSSIITVTDTETNAKLSASMIERFDAHEKDLVELKAFIKLNLPKQYEEIFSNAAIDGYAGYIDGKTKQVDFYKYLKTILENIEGADYFIAKIEEENFLRKQRTFDNGAIPHQLHLEELEAIIHQQAKYYPFLREDYEKIKSLVTFRIPYFVGPLAKGQSEFAWLTRKADGEIRPWNIEEKVDFGKSAVDFIEKMTNKDTYLPKENVLPKHSLCYQKYMVYNELTKIRYIDDQGKTNYFSGQEKQQIFNDLFKQKRKVKKKDLELFLRNINHVESPTIEGLEDSFNASYATYHDLMKVGIKQEILDNPLNTEMLEDIVKILTVFEDKRMIKEQLQQFSDVLDGTVLKKLERRHYTGWGRLSAKLLVGIRDKQSHLTILDYLMNDDGLNRNLMQLINDSNLSFKSIIEKEQVSTADKDLQSIVADLAGSPAIKKGILQSLKVVEELVSVMGYPPQTIVVEMARENQTTNKGKNNSKPRYKSLEKAIKEFGSQILKEHPTDNQELKNNRLYLYYLQNGKDMYTGQELDIHNLSNYDIDHIVPQSFITDNSIDNLVLTSSAGNREKGDNVPPLEIVQKRKIFWEKLYQGNLMSKRKFDYLTKAERGGLTEADKARFIHRQLVETRQITKNVANILHQRFNYKTDDNEDTMEPVRIVTLKSALVSQFRKQFQLYKVREVNDYHHAHDAYLNGVVANTLLKVYPQLEPEFVYGEYHQFDWFKANKATAKKQFYTNIMLFFAQKERIIDENGEILWDKKYLETIKKVLNYRQMNIVKKTEIQKGEFSNQNPKPRGDSSKLIPKKTNLNPIKYGGFEGSNMAYAIIIEHEKRKKKVTIEKKLIQINIMERKAFEKDEKVFLEGKGYHQPKVLTKLPKYALYECENGRRRMLGSANEVHKGNQMLLPNHLMTLLYHAEKREAIDGESLAYIEAHKAVFGELLAHISEFARKYTLANDKLDEINMLYERNKDGDVKSIAESFVSLKKFNAFGVHKDFNFFGTTIKRKRDRKLKELLNSTIIYQSITGLYESRKRLDS

SEQ ID NO: 250 - protein, 1337 aa, Listeria monocytogenes
MKNMKNPYTIGLDIGTNSVGWAVLTNQYDLVKRKMKVAGNSDKKQIKKNFWGVRLFDDGQTAVDRRMNRTARRRIERRRNRISYLQEIFAVEMANIDANFFCRLNDSFYVDSEKRNSRHPFFATIEEEVAYHKNYRTIYHLREELVNSSEKADLRLVYLALAHIIKYRGNFLIEGALDTKNTSVDGVYEQFIQTYNQVFMSNIEEGTLAKVEENIEVANILAGKFTRREKFERILQLYPGEKSTGMFAQFISLIVGSKGNFQKVFDLIEKTDIECAKDSYEEDLEALLAIIGDEYAELFVAAKNTYNAVVLSSIITVTATETNAKLSASMIERFDAHEKDLGELKAFIKLHLPKQYQEIFNNAAIDGYAGYIDGKTKQVDFYKYLKTILENIEGADYFIAKIEEENFLRKQRTFDNGAIPHQLHLEELEAIIHQQAKYYPFLREDYEKIKSLVTFRIPYFVGPLAKGQSEFAWLTRKADGEIRPWNIEEKVDFGKSAVDFIEKMTNKDTYLPKENVLPKHSLCYQKYMVYNELTKVRYIDDQGKTNYFSGQEKQQIFNDLFKQKRKVKKKDLELFLRNINHIESPTIEGLEDSFNASYATYHDLLKVGMKQEILDNPLNTEMLEDIVKILTVFEDKPMIKEQLQQFSDVLDGGVLKKLERRHYTGWGRLSAKLLVGIREKQSHLTILDYLMNDDGLNRNLMQLINDSNLSFKSIIEKEQVSTTDKDLQSIVADLAGSPAIKKGILQSLKIVDELVSIMGYPPQTIVVEMARENQTTGKGKNNSKPRYKSLEKAIKEFGSKILKEHPTDNQELKNNRLYLYYLQNGKDMYTGQELDIHNLSNYDIDHIVPQSFITDNSIDNLVLTSSAGNREKGGDVPPLEIVRKRKVFWEKLYQGNLMSKRKFDYLTKAERGGLTDADKARFIHRQLVETRQITKNVANILHQRFNNETDNHGNTMEQVRIVTLKSALVSQFRKQFQLYKVREVNDYHHAHDAYLNGVVANTLLKVYPQLEPEFVYGEYHQFDWFKANKATAKKQFYTNIMLFFGQKERIIDENGEILWDKKYLETIKKVLDYRQMNIVKKTEIQKGEFSKATIKPKGNSSKLIPRKENWDPMKYGGLDSPNMAYAVIIEHAKGKKKLIFEKKIIRITIMERKMFEKDEEAFLEEKGYRHPKVLTKLPKYTLYECEKGRRRMLASANEAQKGNQLVLSNHLVSLLYHAKNCEASDGKSLKYIEAHRETFSELLAQVSEFATRYTLADANLSKINNLFEQNKEGDIQAIAQSFVDLMAFNAMGAPASFKFFEATIDRKRYTNLKELLSSTIIYQSITGLYESRKRLDD

SEQ ID NO: 251 - protein, 1337 aa, Listeria monocytogenes
MKNMKNPYTIGLDIGTNSVGWAVLTNQYDLVKRKMKVAGNSDKKQIKKNFWGVRLFDDGQTAVDRRMNRTARRRIERRRNRISYLQEIFAVEMANIDANFFCRLNDSFYVDSEKRNSRHPFFATIEEEVAYHKNYRTIYHLREELVNSSEKADLRLVYLALAHIIKYRGNFLIEGALDTKNTSVDGVYEQFIQTYNQVFMSNIEEGTLAKVEENIEVANILARKFTRREKFERILQLYPGEKSTGMFAQFISLIVGSKGNFQKVFDLIEKTDIECAKDSYEEDLETLLAIIGDEYAELFVAAKNTYNAVVLSSIITVTDTETNAKLSASMIERFDAHEKDLVELKAFIKLNLPKQYEEIFSNAAIDGYAGYIDGKTKQVDFYKYLKTILENIEGADYFIAKIEEENFLRKQRTFDNGAIPHQLHLEELEAIIHQQAKYYPFLREDYEKIKSLVTFRIPYFVGPLAKGQSEFAWLTRKADGEIRPWNIEEKVDFGKSAVDFIEKMTNKDTYLPKENVLPKHSLCYQKYMVYNELTKIRYIDDQGKTNYFSGQEKQQIFNDLFKQKRKVKKKDLELFLRNINHVESPTIEGLEDSFNASYATYHDLMKVGIKQEILDNPLNTEMLEDIVKILTVFEDKRMIKEQLQQFSDVLDGTVLKKLERRHYTGWGRLSAKLLVGIRDKQSHLTILDYLMNDDGLNRNLMQLINDSNLSFKSIIEKEQVSTADKDLQSIVADLAGSPAIKKGILQSLKVVEELVSVMGYPPQTIVVEMARENQTTNKGKNNSKPRYKSLEKAIKEFGSQILKEHPTDNQELKNNRLYLYYLQNGKDMYTGQELDIHNLSNYDIDHIVPQSFITDNSIDNLVLTSSAGNREKGDNVPPLEIVQKRKIFWEKLYQGNLMSKRKFDYLTKAERGGLTEADKARFIHRQLVETRQITKNVANILHQRFNYKTDDNEDTMEPVRIVTLKSALVSQFRKQFQLYKVREVNDYHHAHDAYLNGVVANTLLKVYPQLEPEFVYGEYHQFDWFKANKATAKKQFYTNIMLFFAQKERIIDENGEILWDKKYLETIKKVLNYRQMNIVKKTEIQKGEFSNQNPKPRGDSSKLIPKKTNLNPIKYGGFEGSNMAYAIIIEHEKRKKKVTIEKKLIQINIMERKAFEKDEKVFLEGKGYHQPKVLTKLPKYALYECENGRRRMLGSANEVHKGNQMLLPNHLMTLLYHAEKREAIDGESLAYIEAHKAVFGELLAHISEFARKYTLANDKLDEINMLYERNKDGDVKSIAESFVSLKKFNAFGVHKDFNFFGTTIKRKRDRKLKELLNSTIIYQSITGLYESRKRLDS

SEQ ID NO: 252 - protein, 782 aa, Listeria monocytogenes
  misc_feature (722)..(722): Xaa can be any naturally occurring amino acid
IFNDLFKQKRKVKKKDLELFLRNINQIESPTIEGLEDSFNASYATYHDLLKVGMKQEILDNPLNTEMLEDIVKILTVFEDKRMIKEQLQQFSDVLDGVVLKKLERRHYTGWGRLSAKLLVGIRDKQSHLTILEYLMNDDGLNRNLMQLINDSNLSFKSIIEKEQVSTTDKDLQSIVADLAGSPAIKKGILQSLKIVDELVSIMGYPPQTIVVEMARENQTTVKGKNNSRPRYKSLEKAIKEFGSQILKEHPTDNQELKNNRLYLYYLQNGKDIYTGQELDIHNLSNYDIDHIVPQSFITDNSIDNLVLTSSAGNREKGDDVPPLEIVRKRKVFWEKLYQGNLMSKRKFDYLTKAERGGLTEADKARFIHRQLVETRQITKNVANILHQRFNNETDNHGNTMEQVRIVTLKSALVSQFRKQFQLYKVREVNDYHHAHDAYLNGVVANTLLKVYPQLEPEFVYGEYHQFDWFKANKATAKKQFYTNIMLFFAQKERIIDENGEILWDKKYLETIKKVLDYRQMNIVKKTEIQKGEFSKATIKPKGNSSKLIPRKENWDPMKYGGLDSPNMAYAVIIEHAKGKKKIVIEKKLIQINIMERKMFEKDEEAFLEEKGYRHPKVLTKLPKYTLYECEKGRRRMLASANEAQKGNQLVLSNHLVSLLYHAKNCEASDGKSLKYTEAHRETFSELLAQVSEFATRYTLADANLSKINNLFEQNKEGDIKXIAQSFVDLMVFNAMGAPASFKFFEATIDRKRYTNLKELLSSTIIYQSITGLYESRKRLDD

SEQ ID NO: 253 - protein, 1334 aa, Listeria seeligeri
MKKPYTIGLDIGTNSVGWAALTDQYDLVKRKMKVAGNSEKKQIKKNLWGVRLVDEGKTAAHRRVNRTTRRRIERRRNRISYLQEIFTAEMFEVDANFFYRLEDSFYIESEKRQSRHPFFATIEEEVAYHENYRTIYHLREKLVNSSDKADLRLVYLALAHIIKYRGNFLIEGKLDTKNTSVDEVFKQFIKTYNQVFASDIEEGSLTRIEENNEVAKIFSEKLTKREKLDKILNLYPNEKSTDLFAQFISLIIGSKGNFKKFFNLTEKTDIECAKDSYEEDLEVLLARVGDEYAEIFVAAKNAYNAVVLSSIITVSNTETKAKLSASMIERFDKHDKDLKRMKAFFKVRLPENFNEVFNDVEKDGYAGYIEGKTKQEAFYKYMKKMLEHVEGADYFINQIEEENFLRKQRTFDNGAIPHQLHLEELEAILHQQAKYYPFLKVDYEKIKSLVTFRIPYFVGPLANGQSEFSWLTRKADGEIRPWNIEEKVDFGKSAIDFIEKMTNKDTYLPKENVLPKHSMCYQKYMVYNELTKIRYTDDQGKTHYFSGQEKQQIFNDLFKQKRKVKKKDLELFLYNMNHVESPTVEGVEDAFNSSFTTYHDLQKVGVPQEILDDPLNTEMLEEIIKILTVFEDKRMINERLQEFSNVLDEAVLKKLERRHYTGWGRLSAKLLIGIRDKESHLTILDYLMNDDKHNRNLMQLINDSNLSFKSIIEKEQVSTADKDIQSIVADLAGSPAIKKGILQSLKIVDELVGIMGYPPQTIVVEMARENQTTGKGKNNSKPRFTSLEKAIKELGSQILKEHPTDNQGLKNDRLYLYYLQNGKDMYTGQELDIHNLSNYDIDHVVPQSFITDNSIDNRVLASSAANREKGDNVPSLEVVRKRKVYWEKLYQAKLMSKRKFDYLTKAERGGLTEADKARFIHRQLVETRQITKNVANILHQRFNCKKDESGNVIEQVRIVTLKAALVSQFRKQFQLYKVREVNDYHHAHDAYLNCVVANTLLKVYPQLEPEFVYGDYHQFDWFKANKATAKKQFYTNIMLFFAKKDRIIDENGEILWDKKYLDTIKKVLNYRQMNIVKKTEIQKGEFSNATANPKGNSSKLIPRKADWDPIKYGGFDGSNMAYAIVIEHEKRKKKTVIKKELIQINIMERTAFEKDQKEFLEGKGYRNPKVITKIPKYTLYECENGRRRMLGSANEAQKGNQMVLPNHLMTLLYHAKNCEASDGKSLAYIESHREMFAELLDSISEFASRYTLADANLEKINTIFEQNKSGDVKVIAQSFVNLLEFNAMGAPASFKYFETNIERKRYNNLKELLNATIIYQSITGLYEARKRLDD

SEQ ID NO: 254 - protein, 1400 aa, Plant multiplex genome editing vector pYLCRISPR/Cas9Pubi-H
MAPKKKRKVGIHGVPAADKKYSIGLDIGTNSVGWAVITDEYKVPSKKFKVLGNTDRHSIKKNLIGALLFDSGETAEATRLKRTARRRYTRRKNRICYLQEIFSNEMAKVDDSFFHRLEESFLVEEDKKHERHPIFGNIVDEVAYHEKYPTIYHLRKKLVDSTDKADLRLIYLALAHMIKFRGHFLIEGDLNPDNSDVDKLFIQLVQTYNQLFEENPINASGVDAKAILSARLSKSRRLENLIAQLPGEKKNGLFGNLIALSLGLTPNFKSNFDLAEDAKLQLSKDTYDDDLDNLLAQIGDQYADLFLAAKNLSDAILLSDILRVNTEITKAPLSASMIKRYDEHHQDLTLLKALVRQQLPEKYKEIFFDQSKNGYAGYIDGGASQEEFYKFIKPILEKMDGTEELLVKLNREDLLRKQRTFDNGSIPHQIHLGELHAILRRQEDFYPFLKDNREKIEKILTFRIPYYVGPLARGNSRFAWMTRKSEETITPWNFEEVVDKGASAQSFIERMTNFDKNLPNEKVLPKHSLLYEYFTVYNELTKVKYVTEGMRKPAFLSGEQKKAIVDLLFKTNRKVTVKQLKEDYFKKIECFDSVEISGVEDRFNASLGTYHDLLKIIKDKDFLDNEENEDILEDIVLTLTLFEDREMIEERLKTYAHLFDDKVMKQLKRRRYTGWGRLSRKLINGIRDKQSGKTILDFLKSDGFANRNFMQLIHDDSLTFKEDIQKAQVSGQGDSLHEHIANLAGSPAIKKGILQTVKVVDELVKVMGRHKPENIVIEMARENQTTQKGQKNSRERMKRIEEGIKELGSQILKEHPVENTQLQNEKLYLYYLQNGRDMYVDQELDINRLSDYDVDHIVPQSFLKDDSIDNKVLTRSDKNRGKSDNVPSEEVVKKMKNYWRQLLNAKLITQRKFDNLTKAERGGLSELDKAGFIKRQLVETRQITKHVAQILDSRMNTKYDENDKLIREVKVITLKSKLVSDFRKDFQFYKVREINNYHHAHDAYLNAVVGTALIKKYPKLESEFVYGDYKVYDVRKMIAKSEQEIGKATAKYFFYSNIMNFFKTEITLANGEIRKRPLIETNGETGEIVWDKGRDFATVRKVLSMPQVNIVKKTEVQTGGFSKESILPKRNSDKLIARKKDWDPKKYGGFDSPTVAYSVLVVAKVEKGKSKKLKSVKELLGITIMERSSFEKNPIDFLEAKGYKEVKKDLIIKLPKYSLFELENGRKRMLASAGELQKGNELALPSKYVNFLYLASHYEKLKGSPEDNEQKQLFVEQHKHYLDEIIEQISEFSKRVILADANLDKVLSAYNKHRDKPIREQAENIIHLFTLTNLGAPAAFKYFDTTIDRKRYTSTKEVLDATLIHQSITGLYETRIDLSQLGGDKRPAATKKAGQAKKKK

SEQ ID NO: 255 - protein, 1333 aa, Roseburia hominis
MSQNIVDYCIGLDLGTGSVGWAVVDMNHRLMKRNGKHLWGSRLFSNAETAATRRSSRSIRRRYNKRRERIRLLRAILQDMVLEKDPTFFIRLEHTSFLDEEDKAKYLGTDYKDNYNLFIDEDFNDYTYYHKYPTIYHLRKALCESTEKADPRLIYLALHHIVKYRGNFLYEGQKFNMDASNIEDKLSDVFTQFADFNNIPYEDDEKKNLEILEILKKPLSKKAKVDEVMALISPEKEFKSAYKELVTGIAGNKMNVTKMILCESIKQGDSEIKLKFSDSNYDDQFSEVENDLGEYVEFIDSLHNIYSWVELQTIMGATHTDNASISEAMVSRYNKHHEDLQLLKKCIKDNVPKKYFDMFRNDSEKVKGYYNYINRPNKAPVDEFYKFVKKCIEKVDTPEAKQILHDIELENFLLKQNSRTNGSVPYQMQLDEMIKIIDNQAKYYPVLKEKREQLLSILTFRIPYYFGPLNETSEHAWIKRLEGKENQRILPWNYQDTVDVDATAEGFIKRMRSYCTYFPDEEVLPKNSLIVSKYEVYNELNKIRVDDKLLEVDVKNDIYNELFMKNKTVTEKKLKNWLVNNQCCRKDAEIKGFQKENQFSTSLTPWIDFTNIFGKIDQSNFDLIEKIIYDLTVFEDKKIMKRRLKKKYALPDDKIKQILKLKYKDWSRLSKKLLDGIVADNRFGSSVTVLDVLEMSRLNLMEIINDKELGYAQMIEEASSCPKDGKFTYEEVAKLAGSPALKRGIWQSLQIVEEITKVMKCRPKYIYIEFERSEEAKERTESKIKKLENVYKDLDEQTKKEYKSVLEELKGFDNTKKISSDSLFLYFTQLGKCMYSGKKLDIDSLDKYQIDHIVPQSLVKDDSFDNRVLVLPSENQRKLDDLVVPFDIRDKMYRFWKLLFDHELISPKKFYSLIKTEYTERDEERFINRQLVETRQITKNVTQIIEDHYSTTKVAAIRANLSHEFRVKNHIYKNRDINDYHHAHDAYIVALIGGFMRDRYPNMHDSKAVYSEYMKMFRKNKNDQKKWKDGFVINSMNYPYEVDGKLIWNPDLINEIKKCFYYKDCYCTTKLDQKSGQMFNLTVLPNDAHSAKGTTEAVIPVNKNRKDVNKYGGFSGLQYVIAAIEGTKKKGKKLVKVRKLSGIPLYLKQADIKEQIEYVEKEEKLSDVKIIKNNIPLNQLIEIDGRQYLLTSPTECVNAMQLVLNEEQCKLIADIYNAIYKQDFDGLDNMLMIQLYLQLIDKLKTLYPIYMGIVEKFEKLTEDFVSISKEEKANVIKQMLIIMHKGPQNGNIIYDDFNVGKRIGRLNGRTFYLDNIEFISQSPTGIYTKKYKL

SEQ ID NO: 256 - protein, 1335 aa, Sharpea azabuensis
MAKNKDIRYSIGLDIGTNSVGWAVMDEHYELLKKGNHHMWGSRLFDAAEPAATRRASRSIRRRYNKRRERIRLLRDLLGDMVMEVDPTFFIRLLNVSFLDEEDKQKNLGNDYKDNYNLFIEKDFNDKTYYDKYPTIYHLRKELCENKEKADPRLIYLALHHIVKYRGNFLYEGQSFTMDNSDIEERLNSAIEKFMSINEFDNRIVESDINSMIAVLSKIYQRSKKADDLLKIMNPTKEEKAAYKEFTKALVGLKFNISKMILAQEVKKGDTDIVLEFSNANYDSTIDELQSELGEYIEFIEMLHNIYSWVELQAILGATHTDNPSISAAMVERYEEHKKDLRVLKKVIREELPDKYNEVFRKDNRKLHNYLGYIKYPKDTPVEEFYKYIKGLLAKVDTDEAREILERIDLEKFMLKQNSRTNGSIPYQMQKDEMIQIIDNQSVYYPQLKENRDKLISILEFRIPYYFGPLNAHSEFAWIKKFEDKQKERILPWNYDQIVDIDATAEGFIERMKNTGTYFPDEPVMAKNSLTVSKFEVLNELNKIRINGKLIAVETKKELLSDLFMKNKTITDKKLKDWLVTHQYYDINEELKIEGYQKDLQFSTSLAPWIDFTKIFGEINASNYQLIEKIIYDISIFEDKKILKRRLKKVYQLDDLLVDKILKLNYTGWSRLSEKLLTGMTADNEFGSKATVLFVLENSNKNLMEIINDEKLGYKQIIEESNMQDIEGPFKYDEVKKLAGSPAIKRGIWQALLVVREITKFMKHEPSHIYIEFAREEQEKVRKESKIAKLQKIYENLNLQTKEDQQVYESLKKEDAKKRMETDALYLYYLQMGKSMYSGKPLDIDKLSTYQIDHILPQSLIKDDSFDNRVLVLPEENQWKLDSETVPFEIRNKMIGFWQMLHENGLMSNKKFFSLIRTDFSDKDKERFINRQLVETRQIIKNVAVIINDHYTNTNIVTVRAELSHQFRERYKIYKNRDINDFHHAHDAYIACIVGQFMHQNFEHLDAKIIYGQYKKNYKKDVKHHNNYGFILNSMNHLQSDIDTGEVMWDPAKIGKIKSCFYYKDVYVTKKLEQNSGTLFNVTVLPNDAHSEKGITAATVPLNKYRADVHKYGGFGNVQSIIVAIEGKKKKGKKLIDVRKLTSIPLHLKNAPVEEQLSYIASPEHEDLIDVRIVKEILKNQLIEIDGGLYYVTSPTEYVTARQLSLNEQSCKLISEIYAAMLKKRYEYLDEEEIFDLYLQLLQKMDTLYPAYKGIAKRFFDRAEDFKNIDVVEKCDVIKQILIIMHAGPMNGNIMYDDFKFTNRIGRFTHKNIDLNKTTFISTSVTGLFSKKYKL

SEQ ID NO: 257 - protein, 1417 aa, Artificial Sequence
  Synthetic polypeptide
MDYKDDDDKDYKDDDDKMAPKKKRKVGIHGVPAADKKYSIGLDIGTNSVGWAVITDEYKVPSKKFKVLGNTDRHSIKKNLIGALLFDSGETAEATRLKRTARRRYTRRKNRICYLQEIFSNEMAKVDDSFFHRLEESFLVEEDKKHERHPIFGNIVDEVAYHEKYPTIYHLRKKLVDSTDKADLRLIYLALAHMIKFRGHFLIEGDLNPDNSDVDKLFIQLVQTYNQLFEENPINASGVDAKAILSARLSKSRRLENLIAQLPGEKKNGLFGNLIALSLGLTPNFKSNFDLAEDAKLQLSKDTYDDDLDNLLAQIGDQYADLFLAAKNLSDAILLSDILRVNTEITKAPLSASMIKRYDEHHQDLTLLKALVRQQLPEKYKEIFFDQSKNGYAGYIDGGASQEEFYKFIKPILEKMDGTEELLVKLNREDLLRKQRTFDNGSIPHQIHLGELHAILRRQEDFYPFLKDNREKIEKILTFRIPYYVGPLARGNSRFAWMTRKSEETITPWNFEEVVDKGASAQSFIERMTNFDKNLPNEKVLPKHSLLYEYFTVYNELTKVKYVTEGMRKPAFLSGEQKKAIVDLLFKTNRKVTVKQLKEDYFKKIECFDSVEISGVEDRFNASLGTYHDLLKIIKDKDFLDNEENEDILEDIVLTLTLFEDREMIEERLKTYAHLFDDKVMKQLKRRRYTGWGRLSRKLINGIRDKQSGKTILDFLKSDGFANRNFMQLIHDDSLTFKEDIQKAQVSGQGDSLHEHIANLAGSPAIKKGILQTVKVVDELVKVMGRHKPENIVIEMARENQTTQKGQKNSRERMKRIEEGIKELGSQILKEHPVENTQLQNEKLYLYYLQNGRDMYVDQELDINRLSDYDVDHIVPQSFLKDDSIDNKVLTRSDKNRGKSDNVPSEEVVKKMKNYWRQLLNAKLITQRKFDNLTKAERGGLSELDKAGFIKRQLVETRQITKHVAQILDSRMNTKYDENDKLIREVKVITLKSKLVSDFRKDFQFYKVREINNYHHAHDAYLNAVVGTALIKKYPKLESEFVYGDYKVYDVRKMIAKSEQEIGKATAKYFFYSNIMNFFKTEITLANGEIRKRPLIETNGETGEIVWDKGRDFATVRKVLSMPQVNIVKKTEVQTGGFSKESILPKRNSDKLIARKKDWDPKKYGGFDSPTVAYSVLVVAKVEKGKSKKLKSVKELLGITIMERSSFEKNPIDFLEAKGYKEVKKDLIIKLPKYSLFELENGRKRMLASAGELQKGNELALPSKYVNFLYLASHYEKLKGSPEDNEQKQLFVEQHKHYLDEIIEQISEFSKRVILADANLDKVLSAYNKHRDKPIREQAENIIHLFTLTNLGAPAAFKYFDTTIDRKRYTSTKEVLDATLIHQSITGLYETRIDLSQLGGDKRPAATKKAGQAKKKK

SEQ ID NO: 258 - protein, 1368 aa, Artificial Sequence; identical to SEQ ID NO: 2
  Synthetic polypeptide

SEQ ID NO: 259 - protein, 1376 aa, Artificial Sequence
  Synthetic polypeptide
MDKKYSIGLDIGTNSVGWAVITDEYKVPSKKFKVLGNTDRHSIKKNLIGALLFDSGETAEATRLKRTARRRYTRRKNRICYLQEIFSNEMAKVDDSFFHRLEESFLVEEDKKHERHPIFGNIVDEVAYHEKYPTIYHLRKKLVDSTDKADLRLIYLALAHMIKFRGHFLIEGDLNPDNSDVDKLFIQLVQTYNQLFEENPINASGVDAKAILSARLSKSRRLENLIAQLPGEKKNGLFGNLIALSLGLTPNFKSNFDLAEDAKLQLSKDTYDDDLDNLLAQIGDQYADLFLAAKNLSDAILLSDILRVNTEITKAPLSASMIKRYDEHHQDLTLLKALVRQQLPEKYKEIFFDQSKNGYAGYIDGGASQEEFYKFIKPILEKMDGTEELLVKLNREDLLRKQRTFDNGSIPHQIHLGELHAILRRQEDFYPFLKDNREKIEKILTFRIPYYVGPLARGNSRFAWMTRKSEETITPWNFEEVVDKGASAQSFIERMTNFDKNLPNEKVLPKHSLLYEYFTVYNELTKVKYVTEGMRKPAFLSGEQKKAIVDLLFKTNRKVTVKQLKEDYFKKIECFDSVEISGVEDRFNASLGTYHDLLKIIKDKDFLDNEENEDILEDIVLTLTLFEDREMIEERLKTYAHLFDDKVMKQLKRRRYTGWGRLSRKLINGIRDKQSGKTILDFLKSDGFANRNFMQLIHDDSLTFKEDIQKAQVSGQGDSLHEHIANLAGSPAIKKGILQTVKVVDELVKVMGRHKPENIVIEMARENQTTQKGQKNSRERMKRIEEGIKELGSQILKEHPVENTQLQNEKLYLYYLQNGRDMYVDQELDINRLSDYDVDHIVPQSFLKDDSIDNKVLTRSDKNRGKSDNVPSEEVVKKMKNYWRQLLNAKLITQRKFDNLTKAERGGLSELDKAGFIKRQLVETRQITKHVAQILDSRMNTKYDENDKLIREVKVITLKSKLVSDFRKDFQFYKVREINNYHHAHDAYLNAVVGTALIKKYPKLESEFVYGDYKVYDVRKMIAKSEQEIGKATAKYFFYSNIMNFFKTEITLANGEIRKRPLIETNGETGEIVWDKGRDFATVRKVLSMPQVNIVKKTEVQTGGFSKESILPKRNSDKLIARKKDWDPKKYGGFDSPTVAYSVLVVAKVEKGKSKKLKSVKELLGITIMERSSFEKNPIDFLEAKGYKEVKKDLIIKLPKYSLFELENGRKRMLASAGELQKGNELALPSKYVNFLYLASHYEKLKGSPEDNEQKQLFVEQHKHYLDEIIEQISEFSKRVILADANLDKVLSAYNKHRDKPIREQAENIIHLFTLTNLGAPAAFKYFDTTIDRKRYTSTKEVLDATLIHQSITGLYETRIDLSQLGGDPPKKKRKV

SEQ ID NO: 260 - protein, 1372 aa, Artificial Sequence
  Synthetic polypeptide
GAASMDKKYSIGLAIGTNSVGWAVITDEYKVPSKKFKVLGNTDRHSIKKNLIGALLFDSGETAEATRLKRTARRRYTRRKNRICYLQEIFSNEMAKVDDSFFHRLEESFLVEEDKKHERHPIFGNIVDEVAYHEKYPTIYHLRKKLVDSTDKADLRLIYLALAHMIKFRGHFLIEGDLNPDNSDVDKLFIQLVQTYNQLFEENPINASGVDAKAILSARLSKSRRLENLIAQLPGEKKNGLFGNLIALSLGLTPNFKSNFDLAEDAKLQLSKDTYDDDLDNLLAQIGDQYADLFLAAKNLSDAILLSDILRVNTEITKAPLSASMIKRYDEHHQDLTLLKALVRQQLPEKYKEIFFDQSKNGYAGYIDGGASQEEFYKFIKPILEKMDGTEELLVKLNREDLLRKQRTFDNGSIPHQIHLGELHAILRRQEDFYPFLKDNREKIEKILTFRIPYYVGPLARGNSRFAWMTRKSEETITPWNFEEVVDKGASAQSFIERMTNFDKNLPNEKVLPKHSLLYEYFTVYNELTKVKYVTEGMRKPAFLSGEQKKAIVDLLFKTNRKVTVKQLKEDYFKKIECFDSVEISGVEDRFNASLGTYHDLLKIIKDKDFLDNEENEDILEDIVLTLTLFEDREMIEERLKTYAHLFDDKVMKQLKRRRYTGWGRLSRKLINGIRDKQSGKTILDFLKSDGFANRNFMQLIHDDSLTFKEDIQKAQVSGQGDSLHEHIANLAGSPAIKKGILQTVKVVDELVKVMGRHKPENIVIEMARENQTTQKGQKNSRERMKRIEEGIKELGSQILKEHPVENTQLQNEKLYLYYLQNGRDMYVDQELDINRLSDYDVDAIVPQSFLKDDSIDNKVLTRSDKNRGKSDNVPSEEVVKKMKNYWRQLLNAKLITQRKFDNLTKAERGGLSELDKAGFIKRQLVETRQITKHVAQILDSRMNTKYDENDKLIREVKVITLKSKLVSDFRKDFQFYKVREINNYHHAHDAYLNAVVGTALIKKYPKLESEFVYGDYKVYDVRKMIAKSEQEIGKATAKYFFYSNIMNFFKTEITLANGEIRKRPLIETNGETGEIVWDKGRDFATVRKVLSMPQVNIVKKTEVQTGGFSKESILPKRNSDKLIARKKDWDPKKYGGFDSPTVAYSVLVVAKVEKGKSKKLKSVKELLGITIMERSSFEKNPIDFLEAKGYKEVKKDLIIKLPKYSLFELENGRKRMLASAGELQKGNELALPSKYVNFLYLASHYEKLKGSPEDNEQKQLFVEQHKHYLDEIIEQISEFSKRVILADANLDKVLSAYNKHRDKPIREQAENIIHLFTLTNLGAPAAFKYFDTTIDRKRYTSTKEVLDATLIHQSITGLYETRIDLSQLGGD

SEQ ID NO: 261 - protein, 1300 aa, Francisella novicida
MSIYQEFVNKYSLSKTLRFELIPQGKTLENIKARGLILDDEKRAKDYKKAKQIIDKYHQFFIEEILSSVCISEDLLQNYSDVYFKLKKSDDDNLQKDFKSAKDTIKKQISEYIKDSEKFKNLFNQNLIDAKKGQESDLILWLKQSKDNGIELFKANSDITDIDEALEIIKSFKGWTTYFKGFHENRKNVYSSNDIPTSIIYRIVDDNLPKFLENKAKYESLKDKAPEAINYEQIKKDLAEELTFDIDYKTSEVNQRVFSLDEVFEIANFNNYLNQSGITKFNTIIGGKFVNGENTKRKGINEYINLYSQQINDKTLKKYKMSVLFKQILSDTESKSFVIDKLEDDSDVVTTMQSFYEQIAAFKTVEEKSIKETLSLLFDDLKAQKLDLSKIYFKNDKSLTDLSQQVFDDYSVIGTAVLEYITQQIAPKNLDNPSKKEQELIAKKTEKAKYLSLETIKLALEEFNKHRDIDKQCRFEEILANFAAIPMIFDEIAQNKDNLAQISIKYQNQGKKDLLQASAEDDVKAIKDLLDQTNNLLHKLKIFHISQSEDKANILDKDEHFYLVFEECYFELANIVPLYNKIRNYITQKPYSDEKFKLNFENSTLANGWDKNKEPDNTAILFIKDDKYYLGVMNKKNNKIFDDKAIKENKGEGYKKIVYKLLPGANKMLPKVFFSAKSIKFYNPSEDILRIRNHSTHTKNGSPQKGYEKFEFNIEDCRKFIDFYKQSISKHPEWKDFGFRFSDTQRYNSIDEFYREVENQGYKLTFENISESYIDSVVNQGKLYLFQIYNKDFSAYSKGRPNLHTLYWKALFDERNLQDVVYKLNGEAELFYRKQSIPKKITHPAKEAIANKNKDNPKKESVFEYDLIKDKRFTEDKFFFHCPITINFKSSGANKFNDEINLLLKEKANDVHILSIARGERHLAYYTLVDGKGNIIKQDTFNIIGNDRMKTNYHDKLAAIEKDRDSARKDWKKINNIKEMKEGYLSQVVHEIAKLVIEYNAIVVFEDLNFGFKRGRFKVEKQVYQKLEKMLIEKLNYLVFKDNEFDKTGGVLRAYQLTAPFETFKKMGKQTGIIYYVPAGFTSKICPVTGFVNQLYPKYESVSKSQEFFSKFDKICYNLDKGYFEFSFDYKNFGDKAAKGKWTIASFGSRLINFRNSDKNHNWDTREVYPTKELEKLLKDYSIEYGHGECIKAAICGESDKKFFAKLTSVLNTILQMRNSKTGTELDYLISPVADVNGNFFDSRQAPKNMPQDADANGAYHIGLKGLMLLGRIKNNQEGKKLNLVIKNEEYFEFVQNRNN

SEQ ID NO: 262 - protein, 1300 aa, Francisella novicida
MSIYQEFVNKYSLSKTLRFELIPQGKTLENIKARGLILDDEKRAKDYKKAKQIIDKYHQFFIEEILSSVCISEDLLQNYSDVYFKLKKSDDDNLQKDFKSAKDTIKKQISEYIKDSEKFKNLFNQNLIDAKKGQESDLILWLKQSKDNGIELFKANSDITDIDEALEIIKSFKGWTTYFKGFHENRKNVYSSNDIPTSIIYRIVDDNLPKFLENKAKYESLKDKAPEAINYEQIKKDLAEELTFDIDYKTSEVNQRVFSLDEVFEIANFNNYLNQSGITKFNTIIGGKFVNGENTKRKGINEYINLYSQQINDKTLKKYKMSVLFKQILSDTESKSFVIDKLEDDSDVVTTMQSFYEQIAAFKTVEEKSIKETLSLLFDDLKAQKLDLSKIYFKNDKSLTDLSQQVFDDYSVIGTAVLEYITQQIAPKNLDNPSKKEQELIAKKTEKAKYLSLETIKLALEEFNKHRDIDKQCRFEEILANFAAIPMIFDEIAQNKDNLAQISIKYQNQGKKDLLQASAEDDVKAIKDLLDQTNNLLHKLKIFHISQSEDKANILDKDEHFYLVFEECYFELANIVPLYNKIRNYITQKPYSDEKFKLNFENSTLANGWDKNKEPDNTAILFIKDDKYYLGVMNKKNNKIFDDKAIKENKGEGYKKIVYKLLPGANKMLPKVFFSAKSIKFYNPSEDILRIRNHSTHTKNGSPQKGYEKFEFNIEDCRKFIDFYKQSISKHPEWKDFGFRFSDTQRYNSIDEFYREVENQGYKLTFENISESYIDSVVNQGKLYLFQIYNKDFSAYSKGRPNLHTLYWKALFDERNLQDVVYKLNGEAELFYRKQSIPKKITHPAKEAIANKNKDNPKKESVFEYDLIKDKRFTEDKFFFHCPITINFKSSGANKFNDEINLLLKEKANDVHILSIDRGERHLAYYTLVDGKGNIIKQDTFNIIGNDRMKTNYHDKLAAIEKDRDSARKDWKKINNIKEMKEGYLSQVVHEIAKLVIEYNAIVVFADLNFGFKRGRFKVEKQVYQKLEKMLIEKLNYLVFKDNEFDKTGGVLRAYQLTAPFETFKKMGKQTGIIYYVPAGFTSKICPVTGFVNQLYPKYESVSKSQEFFSKFDKICYNLDKGYFEFSFDYKNFGDKAAKGKWTIASFGSRLINFRNSDKNHNWDTREVYPTKELEKLLKDYSIEYGHGECIKAAICGESDKKFFAKLTSVLNTILQMRNSKTGTELDYLISPVADVNGNFFDSRQAPKNMPQDADANGAYHIGLKGLMLLGRIKNNQEGKKLNLVIKNEEYFEFVQNRNN

SEQ ID NO: 263 - protein, 1300 aa, Francisella novicida
MSIYQEFVNKYSLSKTLRFELIPQGKTLENIKARGLILDDEKRAKDYKKAKQIIDKYHQFFIEEILSSVCISEDLLQNYSDVYFKLKKSDDDNLQKDFKSAKDTIKKQISEYIKDSEKFKNLFNQNLIDAKKGQESDLILWLKQSKDNGIELFKANSDITDIDEALEIIKSFKGWTTYFKGFHENRKNVYSSNDIPTSIIYRIVDDNLPKFLENKAKYESLKDKAPEAINYEQIKKDLAEELTFDIDYKTSEVNQRVFSLDEVFEIANFNNYLNQSGITKFNTIIGGKFVNGENTKRKGINEYINLYSQQINDKTLKKYKMSVLFKQILSDTESKSFVIDKLEDDSDVVTTMQSFYEQIAAFKTVEEKSIKETLSLLFDDLKAQKLDLSKIYFKNDKSLTDLSQQVFDDYSVIGTAVLEYITQQIAPKNLDNPSKKEQELIAKKTEKAKYLSLETIKLALEEFNKHRDIDKQCRFEEILANFAAIPMIFDEIAQNKDNLAQISIKYQNQGKKDLLQASAEDDVKAIKDLLDQTNNLLHKLKIFHISQSEDKANILDKDEHFYLVFEECYFELANIVPLYNKIRNYITQKPYSDEKFKLNFENSTLANGWDKNKEPDNTAILFIKDDKYYLGVMNKKNNKIFDDKAIKENKGEGYKKIVYKLLPGANKMLPKVFFSAKSIKFYNPSEDILRIRNHSTHTKNGSPQKGYEKFEFNIEDCRKFIDFYKQSISKHPEWKDFGFRFSDTQRYNSIDEFYREVENQGYKLTFENISESYIDSVVNQGKLYLFQIYNKDFSAYSKGRPNLHTLYWKALFDERNLQDVVYKLNGEAELFYRKQSIPKKITHPAKEAIANKNKDNPKKESVFEYDLIKDKRFTEDKFFFHCPITINFKSSGANKFNDEINLLLKEKANDVHILSIDRGERHLAYYTLVDGKGNIIKQDTFNIIGNDRMKTNYHDKLAAIEKDRDSARKDWKKINNIKEMKEGYLSQVVHEIAKLVIEYNAIVVFEDLNFGFKRGRFKVEKQVYQKLEKMLIEKLNYLVFKDNEFDKTGGVLRAYQLTAPFETFKKMGKQTGIIYYVPAGFTSKICPVTGFVNQLYPKYESVSKSQEFFSKFDKICYNLDKGYFEFSFDYKNFGDKAAKGKWTIASFGSRLINFRNSDKNHNWDTREVYPTKELEKLLKDYSIEYGHGECIKAAICGESDKKFFAKLTSVLNTILQMRNSKTGTELDYLISPVADVNGNFFDSRQAPKNMPQDAAANGAYHIGLKGLMLLGRIKNNQEGKKLNLVIKNEEYFEFVQNRNN

SEQ ID NO: 264 - protein, 1300 aa, Francisella novicida
MSIYQEFVNKYSLSKTLRFELIPQGKTLENIKARGLILDDEKRAKDYKKAKQIIDKYHQFFIEEILSSVCISEDLLQNYSDVYFKLKKSDDDNLQKDFKSAKDTIKKQISEYIKDSEKFKNLFNQNLIDAKKGQESDLILWLKQSKDNGIELFKANSDITDIDEALEIIKSFKGWTTYFKGFHENRKNVYSSNDIPTSIIYRIVDDNLPKFLENKAKYESLKDKAPEAINYEQIKKDLAEELTFDIDYKTSEVNQRVFSLDEVFEIANFNNYLNQSGITKFNTIIGGKFVNGENTKRKGINEYINLYSQQINDKTLKKYKMSVLFKQILSDTESKSFVIDKLEDDSDVVTTMQSFYEQIAAFKTVEEKSIKETLSLLFDDLKAQKLDLSKIYFKNDKSLTDLSQQVFDDYSVIGTAVLEYITQQIAPKNLDNPSKKEQELIAKKTEKAKYLSLETIKLALEEFNKHRDIDKQCRFEEILANFAAIPMIFDEIAQNKDNLAQISIKYQNQGKKDLLQASAEDDVKAIKDLLDQTNNLLHKLKIFHISQSEDKANILDKDEHFYLVFEECYFELANIVPLYNKIRNYITQKPYSDEKFKLNFENSTLANGWDKNKEPDNTAILFIKDDKYYLGVMNKKNNKIFDDKAIKENKGEGYKKIVYKLLPGANKMLPKVFFSAKSIKFYNPSEDILRIRNHSTHTKNGSPQKGYEKFEFNIEDCRKFIDFYKQSISKHPEWKDFGFRFSDTQRYNSIDEFYREVENQGYKLTFENISESYIDSVVNQGKLYLFQIYNKDFSAYSKGRPNLHTLYWKALFDERNLQDVVYKLNGEAELFYRKQSIPKKITHPAKEAIANKNKDNPKKESVFEYDLIKDKRFTEDKFFFHCPITINFKSSGANKFNDEINLLLKEKANDVHILSIARGERHLAYYTLVDGKGNIIKQDTFNIIGNDRMKTNYHDKLAAIEKDRDSARKDWKKINNIKEMKEGYLSQVVHEIAKLVIEYNAIVVFADLNFGFKRGRFKVEKQVYQKLEKMLIEKLNYLVFKDNEFDKTGGVLRAYQLTAPFETFKKMGKQTGIIYYVPAGFTSKICPVTGFVNQLYPKYESVSKSQEFFSKFDKICYNLDKGYFEFSFDYKNFGDKAAKGKWTIASFGSRLINFRNSDKNHNWDTREVYPTKELEKLLKDYSIEYGHGECIKAAICGESDKKFFAKLTSVLNTILQMRNSKTGTELDYLISPVADVNGNFFDSRQAPKNMPQDADANGAYHIGLKGLMLLGRIKNNQEGKKLNLVIKNEEYFEFVQNRNN

SEQ ID NO: 265 - protein, 1300 aa, Francisella novicida
MSIYQEFVNKYSLSKTLRFELIPQGKTLENIKARGLILDDEKRAKDYKKAKQIIDKYHQFFIEEILSSVCISEDLLQNYSDVYFKLKKSDDDNLQKDFKSAKDTIKKQISEYIKDSEKFKNLFNQNLIDAKKGQESDLILWLKQSKDNGIELFKANSDITDIDEALEIIKSFKGWTTYFKGFHENRKNVYSSNDIPTSIIYRIVDDNLPKFLENKAKYESLKDKAPEAINYEQIKKDLAEELTFDIDYKTSEVNQRVFSLDEVFEIANFNNYLNQSGITKFNTIIGGKFVNGENTKRKGINEYINLYSQQINDKTLKKYKMSVLFKQILSDTESKSFVIDKLEDDSDVVTTMQSFYEQIAAFKTVEEKSIKETLSLLFDDLKAQKLDLSKIYFKNDKSLTDLSQQVFDDYSVIGTAVLEYITQQIAPKNLDNPSKKEQELIAKKTEKAKYLSLETIKLALEEFNKHRDIDKQCRFEEILANFAAIPMIFDEIAQNKDNLAQISIKYQNQGKKDLLQASAEDDVKAIKDLLDQTNNLLHKLKIFHISQSEDKANILDKDEHFYLVFEECYFELANIVPLYNKIRNYITQKPYSDEKFKLNFENSTLANGWDKNKEPDNTAILFIKDDKYYLGVMNKKNNKIFDDKAIKENKGEGYKKIVYKLLPGANKMLPKVFFSAKSIKFYNPSEDILRIRNHSTHTKNGSPQKGYEKFEFNIEDCRKFIDFYKQSISKHPEWKDFGFRFSDTQRYNSIDEFYREVENQGYKLTFENISESYIDSVVNQGKLYLFQIYNKDFSAYSKGRPNLHTLYWKALFDERNLQDVVYKLNGEAELFYRKQSIPKKITHPAKEAIANKNKDNPKKESVFEYDLIKDKRFTEDKFFFHCPITINFKSSGANKFNDEINLLLKEKANDVHILSIARGERHLAYYTLVDGKGNIIKQDTFNIIGNDRMKTNYHDKLAAIEKDRDSARKDWKKINNIKEMKEGYLSQVVHEIAKLVIEYNAIVVFEDLNFGFKRGRFKVEKQVYQKLEKMLIEKLNYLVFKDNEFDKTGGVLRAYQLTAPFETFKKMGKQTGIIYYVPAGFTSKICPVTGFVNQLYPKYESVSKSQEFFSKFDKICYNLDKGYFEFSFDYKNFGDKAAKGKWTIASFGSRLINFRNSDKNHNWDTREVYPTKELEKLLKDYSIEYGHGECIKAAICGESDKKFFAKLTSVLNTILQMRNSKTGTELDYLISPVADVNGNFFDSRQAPKNMPQDAAANGAYHIGLKGLMLLGRIKNNQEGKKLNLVIKNEEYFEFVQNRNN

SEQ ID NO: 266 - protein, 1300 aa, Francisella novicida
MSIYQEFVNKYSLSKTLRFELIPQGKTLENIKARGLILDDEKRAKDYKKAKQIIDKYHQFFIEEILSSVCISEDLLQNYSDVYFKLKKSDDDNLQKDFKSAKDTIKKQISEYIKDSEKFKNLFNQNLIDAKKGQESDLILWLKQSKDNGIELFKANSDITDIDEALEIIKSFKGWTTYFKGFHENRKNVYSSNDIPTSIIYRIVDDNLPKFLENKAKYESLKDKAPEAINYEQIKKDLAEELTFDIDYKTSEVNQRVFSLDEVFEIANFNNYLNQSGITKFNTIIGGKFVNGENTKRKGINEYINLYSQQINDKTLKKYKMSVLFKQILSDTESKSFVIDKLEDDSDVVTTMQSFYEQIAAFKTVEEKSIKETLSLLFDDLKAQKLDLSKIYFKNDKSLTDLSQQVFDDYSVIGTAVLEYITQQIAPKNLDNPSKKEQELIAKKTEKAKYLSLETIKLALEEFNKHRDIDKQCRFEEILANFAAIPMIFDEIAQNKDNLAQISIKYQNQGKKDLLQASAEDDVKAIKDLLDQTNNLLHKLKIFHISQSEDKANILDKDEHFYLVFEECYFELANIVPLYNKIRNYITQKPYSDEKFKLNFENSTLANGWDKNKEPDNTAILFIKDDKYYLGVMNKKNNKIFDDKAIKENKGEGYKKIVYKLLPGANKMLPKVFFSAKSIKFYNPSEDILRIRNHSTHTKNGSPQKGYEKFEFNIEDCRKFIDFYKQSISKHPEWKDFGFRFSDTQRYNSIDEFYREVENQGYKLTFENISESYIDSVVNQGKLYLFQIYNKDFSAYSKGRPNLHTLYWKALFDERNLQDVVYKLNGEAELFYRKQSIPKKITHPAKEAIANKNKDNPKKESVFEYDLIKDKRFTEDKFFFHCPITINFKSSGANKFNDEINLLLKEKANDVHILSIDRGERHLAYYTLVDGKGNIIKQDTFNIIGNDRMKTNYHDKLAAIEKDRDSARKDWKKINNIKEMKEGYLSQVVHEIAKLVIEYNAIVVFADLNFGFKRGRFKVEKQVYQKLEKMLIEKLNYLVFKDNEFDKTGGVLRAYQLTAPFETFKKMGKQTGIIYYVPAGFTSKICPVTGFVNQLYPKYESVSKSQEFFSKFDKICYNLDKGYFEFSFDYKNFGDKAAKGKWTIASFGSRLINFRNSDKNHNWDTREVYPTKELEKLLKDYSIEYGHGECIKAAICGESDKKFFAKLTSVLNTILQMRNSKTGTELDYLISPVADVNGNFFDSRQAPKNMPQDAAANGAYHIGLKGLMLLGRIKNNQEGKKLNLVIKNEEYFEFVQNRNN

SEQ ID NO: 267 - protein, 1300 aa, Francisella novicida
MSIYQEFVNKYSLSKTLRFELIPQGKTLENIKARGLILDDEKRAKDYKKAKQIIDKYHQFFIEEILSSVCISEDLLQNYSDVYFKLKKSDDDNLQKDFKSAKDTIKKQISEYIKDSEKFKNLFNQNLIDAKKGQESDLILWLKQSKDNGIELFKANSDITDIDEALEIIKSFKGWTTYFKGFHENRKNVYSSNDIPTSIIYRIVDDNLPKFLENKAKYESLKDKAPEAINYEQIKKDLAEELTFDIDYKTSEVNQRVFSLDEVFEIANFNNYLNQSGITKFNTIIGGKFVNGENTKRKGINEYINLYSQQINDKTLKKYKMSVLFKQILSDTESKSFVIDKLEDDSDVVTTMQSFYEQIAAFKTVEEKSIKETLSLLFDDLKAQKLDLSKIYFKNDKSLTDLSQQVFDDYSVIGTAVLEYITQQIAPKNLDNPSKKEQELIAKKTEKAKYLSLETIKLALEEFNKHRDIDKQCRFEEILANFAAIPMIFDEIAQNKDNLAQISIKYQNQGKKDLLQASAEDDVKAIKDLLDQTNNLLHKLKIFHISQSEDKANILDKDEHFYLVFEECYFELANIVPLYNKIRNYITQKPYSDEKFKLNFENSTLANGWDKNKEPDNTAILFIKDDKYYLGVMNKKNNKIFDDKAIKENKGEGYKKIVYKLLPGANKMLPKVFFSAKSIKFYNPSEDILRIRNHSTHTKNGSPQKGYEKFEFNIEDCRKFIDFYKQSISKHPEWKDFGFRFSDTQRYNSIDEFYREVENQGYKLTFENISESYIDSVVNQGKLYLFQIYNKDFSAYSKGRPNLHTLYWKALFDERNLQDVVYKLNGEAELFYRKQSIPKKITHPAKEAIANKNKDNPKKESVFEYDLIKDKRFTEDKFFFHCPITINFKSSGANKFNDEINLLLKEKANDVHILSIARGERHLAYYTLVDGKGNIIKQDTFNIIGNDRMKTNYHDKLAAIEKDRDSARKDWKKINNIKEMKEGYLSQVVHEIAKLVIEYNAIVVFADLNFGFKRGRFKVEKQVYQKLEKMLIEKLNYLVFKDNEFDKTGGVLRAYQLTAPFETFKKMGKQTGIIYYVPAGFTSKICPVTGFVNQLYPKYESVSKSQEFFSKFDKICYNLDKGYFEFSFDYKNFGDKAAKGKWTIASFGSRLINFRNSDKNHNWDTREVYPTKELEKLLKDYSIEYGHGECIKAAICGESDKKFFAKLTSVLNTILQMRNSKTGTELDYLISPVADVNGNFFDSRQAPKNMPQDAAANGAYHIGLKGLMLLGRIKNNQEGKKLNLVIKNEEYFEFVQNRNN

SEQ ID NO: 268 - protein, 1053 aa, Streptococcus Aureus
MKRNYILGLAIGITSVGYGIIDYETRDVIDAGVRLFKEANVENNEGRRSKRGARRLKRRRRHRIQRVKKLLFDYNLLTDHSELSGINPYEARVKGLSQKLSEEEFSAALLHLAKRRGVHNVNEVEEDTGNELSTKEQISRNSKALEEKYVAELQLERLKKDGEVRGSINRFKTSDYVKEAKQLLKVQKAYHQLDQSFIDTYIDLLETRRTYYEGPGEGSPFGWKDIKEWYEMLMGHCTYFPEELRSVKYAYNADLYNALNDLNNLVITRDENEKLEYYEKFQIIENVFKQKKKPTLKQIAKEILVNEEDIKGYRVTSTGKPEFTNLKVYHDIKDITARKEIIENAELLDQIAKILTIYQSSEDIQEELTNLNSELTQEEIEQISNLKGYTGTHNLSLKAINLILDELWHTNDNQIAIFNRLKLVPKKVDLSQQKEIPTTLVDDFILSPVVKRSFIQSIKVINAIIKKYGLPNDIIIELAREKNSKDAQKMINEMQKRNRQTNERIEEIIRTTGKENAKYLIEKIKLHDMQEGKCLYSLEAIPLEDLLNNPFNYEVDHIIPRSVSFDNSFNNKVLVKQEENSKKGNRTPFQYLSSSDSKISYETFKKHILNLAKGKGRISKTKKEYLLEERDINRFSVQKDFINRNLVDTRYATRGLMNLLRSYFRVNNLDVKVKSINGGFTSFLRRKWKFKKERNKGYKHHAEDALIIANADFIFKEWKKLDKAKKVMENQMFEEKQAESMPEIETEQEYKEIFITPHQIKHIKDFKDYKYSHRVDKKPNRKLINDTLYSTRKDDKGNTLIVNNLNGLYDKDNDKLKKLINKSPEKLLMYHHDPQTYQKLKLIMEQYGDEKNPLYKYYEETGNYLTKYSKKDNGPVIKKIKYYGNKLNAHLDITDDYPNSRNKVVKLSLKPYRFDVYLDNGVYKFVTVKNLDVIKKENYYEVNSKCYEEAKKLKKISNQAEFIASFYKNDLIKINGELYRVIGVNNDLLNRIEVNMIDITYREYLENMNDKRPPHIIKTIASKTQSIKKYSTDILGNLYEVKSKKHPQIIKKG

SEQ ID NO: 269 - protein, 1121 aa, Streptococcus thermophilus
MSDLVLGLAIGIGSVGVGILNKVTGEIIHKNSRIFPAAQAENNLVRRTNRQGRRLTRRKKHRRVRLNRLFEESGLITDFTKISINLNPYQLRVKGLTDELSNEELFIALKNMVKHRGISYLDDASDDGNSSIGDYAQIVKENSKQLETKTPGQIQLERYQTYGQLRGDFTVEKDGKKHRLINVFPTSAYRSEALRILQTQQEFNPQITDEFINRYLEILTGKRKYYHGPGNEKSRTDYGRYRTSGETLDNIFGILIGKCTFYPDEFRAAKASYTAQEFNLLNDLNNLTVPTETKKLSKEQKNQIINYVKNEKAMGPAKLFKYIAKLLSCDVADIKGYRIDKSGKAEIHTFEAYRKMKTLETLDIEQMDRETLDKLAYVLTLNTEREGIQEALEHEFADGSFSQKQVDELVQFRKANSSIFGKGWHNFSVKLMMELIPELYETSEEQMTILTRLGKQKTTSSSNKTKYIDEKLLTEEIYNPVVAKSVRQAIKIVNAAIKEYGDFDNIVIEMARETNEDDEKKAIQKIQKANKDEKDAAMLKAANQYNGKAELPHSVFHGHKQLATKIRLWHQQGERCLYTGKTISIHDLINNSNQFEVDHILPLSITFDDSLANKVLVYATANQEKGQRTPYQALDSMDDAWSFRELKAFVRESKTLSNKKKEYLLTEEDISKFDVRKKFIERNLVDTRYASRVVLNALQEHFRAHKIDTKVSVVRGQFTSQLRRHWGIEKTRDTYHHHAVDALIIAASSQLNLWKKQKNTLVSYSEDQLLDIETGELISDDEYKESVFKAPYQHFVDTLKSKEFEDSILFSYQVDSKFNRKISDATIYATRQAKVGKDKADETYVLGKIKDIYTQDGYDAFMKIYKKDKSKFLMYRHDPQTFEKVIEPILENYPNKQINEKGKEVPCNPFLKYKEEHGYIRKYSKKGNGPEIKSLKYYDSKLGNHIDITPKDSNNKVVLQSVSPWRADVYFNKTTGKYEILGLKYADLQFEKGTGTYKISQEKYNDIKKKEGVDSDSEFKFTLYKNDLLLVKDTETKEQQLFRFLSRTMPKQKHYVELKPYDKQKFEGGEALIKVLGNVANSGQCKKGLGKSNISIYKVRTDVLGNQHIIKNEGDKPKLDF

SEQ ID NO: 270 - protein, 887 aa, Natronobacterium gregoryi
MTVIDLDSTTTADELTSGHTYDISVTLTGVYDNTDEQHPRMSLAFEQDNGERRYITLWKNTTPKDVFTYDYATGSTYIFTNIDYEVKDGYENLTATYQTTVENATAQEVGTTDEDETFAGGEPLDHHLDDALNETPDDAETESDSGHVMTSFASRDQLPEWTLHTYTLTATDGAKTDTEYARRTLAYTVRQELYTDHDAAPVATDGLMLLTPEPLGETPLDLDCGVRVEADETRTLDYTTAKDRLLARELVEEGLKRSLWDDYLVRGIDEVLSKEPVLTCDEFDLHERYDLSVEVGHSGRAYLHINFRHRFVPKLTLADIDDDNIYPGLRVKTTYRPRRGHIVWGLRDECATDSLNTLGNQSVVAYHRNNQTPINTDLLDAIEAADRRVVETRRQGHGDDAVSFPQELLAVEPNTHQIKQFASDGFHQQARSKTRLSASRCSEKAQAFAERLDPVRLNGSTVEFSSEFFTGNNEQQLRLLYENGESVLTFRDGARGAHPDETFSKGIVNPPESFEVAVVLPEQQADTCKAQWDTMADLLNQAGAPPTRSETVQYDAFSSPESISLNVAGAIDPSEVDAAFVVLPPDQEGFADLASPTETYDELKKALANMGIYSQMAYFDRFRDAKIFYTRNVALGLLAAAGGVAFTTEHAMPGDADMFIGIDVSRSYPEDGASGQINIAATATAVYKDGTILGHSSTRPQLGEKLQSTDVRDIMKNAILGYQQVTGESPTHIVIHRDGFMNEDLDPATEFLNEQGVEYDIVEIRKQPQTRLLAVSDVQYDTPVKSIAAINQNEPRATVATFGAPEYLATRDGGGLPRPIQIERVAGETDIETLTRQVYLLSQSHIQVHNSTARLPITTAYADQASTHATKGYLVQTGAFESNVGFL

SEQ ID NO: 271 - protein, 198 aa, Mus musculus
MDSLLMKQKKFLYHFKNVRWAKGRHETYLCYVVKRRDSATSCSLDFGHLRNKSGCHVELLFLRYISDWDLDPGRCYRVTWFTSWSPCYDCARHVAEFLRWNPNLSLRIFTARLYFCEDRKAEPEGLRRLHRAGVQIGIMTFKDYFYCWNTFVENRERTFKAWEGLHENSVRLTRQLRRILLPLYEVDDLRDAFRMLGF

SEQ ID NO: 272 - protein, 198 aa, Canis lupus
MDSLLMKQRKFLYHFKNVRWAKGRHETYLCYVVKRRDSATSFSLDFGHLRNKSGCHVELLFLRYISDWDLDPGRCYRVTWFTSWSPCYDCARHVADFLRGYPNLSLRIFAARLYFCEDRKAEPEGLRRLHRAGVQIAIMTFKDYFYCWNTFVENREKTFKAWEGLHENSVRLSRQLRRILLPLYEVDDLRDAFRTLGL

SEQ ID NO: 273 - protein, 199 aa, Bos taurus
MDSLLKKQRQFLYQFKNVRWAKGRHETYLCYVVKRRDSPTSFSLDFGHLRNKAGCHVELLFLRYISDWDLDPGRCYRVTWFTSWSPCYDCARHVADFLRGYPNLSLRIFTARLYFCDKERKAEPEGLRRLHRAGVQIAIMTFKDYFYCWNTFVENHERTFKAWEGLHENSVRLSRQLRRILLPLYEVDDLRDAFRTLGL

SEQ ID NO: 274 - protein, 429 aa, Mus musculus
MGPFCLGCSHRKCYSPIRNLISQETFKFHFKNLGYAKGRKDTFLCYEVTRKDCDSPVSLHHGVFKNKDNIHAEICFLYWFHDKVLKVLSPREEFKITWYMSWSPCFECAEQIVRFLATHHNLSLDIFSSRLYNVQDPETQQNLCRLVQEGAQVAAMDLYEFKKCWKKFVDNGGRRFRPWKRLLTNFRYQDSKLQEILRPCYIPVPSSSSSTLSNICLTKGLPETRFCVEGRRMDPLSEEEFYSQFYNQRVKHLCYYHRMKPYLCYQLEQFNGQAPLKGCLLSEKGKQHAEILFLDKIRSMELSQVTITCYLTWSPCPNCAWQLAAFKRDRPDLILHIYTSRLYFHWKRPFQKGLCSLWQSGILVDVMDLPQFTDCWTNFVNPKRPFWPWKGLEIISRRTQRRLRRIKESWGLQDLVNDFGNLQLGPPMS

SEQ ID NO: 275 - protein, 429 aa, Rattus norvegicus
MGPFCLGCSHRKCYSPIRNLISQETFKFHFKNLRYAIDRKDTFLCYEVTRKDCDSPVSLHHGVFKNKDNIHAEICFLYWFHDKVLKVLSPREEFKITWYMSWSPCFECAEQVLRFLATHHNLSLDIFSSRLYNIRDPENQQNLCRLVQEGAQVAAMDLYEFKKCWKKFVDNGGRRFRPWKKLLTNFRYQDSKLQEILRPCYIPVPSSSSSTLSNICLTKGLPETRFCVERRRVHLLSEEEFYSQFYNQRVKHLCYYHGVKPYLCYQLEQFNGQAPLKGCLLSEKGKQHAEILFLDKIRSMELSQVIITCYLTWSPCPNCAWQLAAFKRDRPDLILHIYTSRLYFHWKRPFQKGLCSLWQSGILVDVMDLPQFTDCWTNFVNPKRPFWPWKGLEIISRRTQRRLHRIKESWGLQDLVNDFGNLQLGPPMS

SEQ ID NO: 276 - protein, 370 aa, Macaca mulatta
MVEPMDPRTFVSNFNNRPILSGLNTVWLCCEVKTKDPSGPPLDAKIFQGKVYSKAKYHPEMRFLRWFHKWRQLHHDQEYKVTWYVSWSPCTRCANSVATFLAKDPKVTLTIFVARLYYFWKPDYQQALRILCQKRGGPHATMKIMNYNEFQDCWNKFVDGRGKPFKPRNNLPKHYTLLQATLGELLRHLMDPGTFTSNFNNKPWVSGQHETYLCYKVERLHNDTWVPLNQHRGFLRNQAPNIHGFPKGRHAELCFLDLIPFWKLDGQQYRVTCFTSWSPCFSCAQEMAKFISNNEHVSLCIFAARIYDDQGRYQEGLRALHRDGAKIAMMNYSEFEYCWDTFVDRQGRPFQPWDGLDEHSQALSGRLRAI

SEQ ID NO: 277 - protein, 384 aa, Pan troglodytes
MKPHFRNPVERMYQDTFSDNFYNRPILSHRNTVWLCYEVKTKGPSRPPLDAKIFRGQVYSKLKYHPEMRFFHWFSKWRKLHRDQEYEVTWYISWSPCTKCTRDVATFLAEDPKVTLTIFVARLYYFWDPDYQEALRSLCQKRDGPRATMKIMNYDEFQHCWSKFVYSQRELFEPWNNLPKYYILLHIMLGEILRHSMDPPTFTSNFNNELWVRGRHETYLCYEVERLHNDTWVLLNQRRGFLCNQAPHKHGFLEGRHAELCFLDVIPFWKLDLHQDYRVTCFTSWSPCFSCAQEMAKFISNNKHVSLCIFAARIYDDQGRCQEGLRTLAKAGAKISIMTYSEFKHCWDTFVDHQGCPFQPWDGLEEHSQALSGRLRAILQNQGN

SEQ ID NO: 278 - protein, 377 aa, Chlorocebus sabaeus
MNPQIRNMVEQMEPDIFVYYFNNRPILSGRNTVWLCYEVKTKDPSGPPLDANIFQGKLYPEAKDHPEMKFLHWFRKWRQLHRDQEYEVTWYVSWSPCTRCANSVATFLAEDPKVTLTIFVARLYYFWKPDYQQALRILCQERGGPHATMKIMNYNEFQHCWNEFVDGQGKPFKPRKNLPKHYTLLHATLGELLRHVMDPGTFTSNFNNKPWVSGQRETYLCYKVERSHNDTWVLLNQHRGFLRNQAPDRHGFPKGRHAELCFLDLIPFWKLDDQQYRVTCFTSWSPCFSCAQKMAKFISNNKHVSLCIFAARIYDDQGRCQEGLRTLHRDGAKIAVMNYSEFEYCWDTFVDRQGRPFQPWDGLDEHSQALSGRLRAI

SEQ ID NO: 279 - protein, 384 aa, Homo sapiens
MKPHFRNTVERMYRDTFSYNFYNRPILSRRNTVWLCYEVKTKGPSRPPLDAKIFRGQVYSELKYHPEMRFFHWFSKWRKLHRDQEYEVTWYISWSPCTKCTRDMATFLAEDPKVTLTIFVARLYYFWDPDYQEALRSLCQKRDGPRATMKIMNYDEFQHCWSKFVYSQRELFEPWNNLPKYYILLHIMLGEILRHSMDPPTFTFNFNNEPWVRGRHETYLCYEVERMHNDTWVLLNQRRGFLCNQAPHKHGFLEGRHAELCFLDVIPFWKLDLDQDYRVTCFTSWSPCFSCAQEMAKFISKNKHVSLCIFTARIYDDQGRCQEGLRTLAEAGAKISIMTYSEFKHCWDTFVDHQGCPFQPWDGLDEHSQDLSGRLRAILQNQEN

SEQ ID NO: 280 - protein, 373 aa, Homo sapiens
MKPHFRNTVERMYRDTFSYNFYNRPILSRRNTVWLCYEVKTKGPSRPRLDAKIFRGQVYSQPEHHAEMCFLSWFCGNQLPAYKCFQITWFVSWTPCPDCVAKLAEFLAEHPNVTLTISAARLYYYWERDYRRALCRLSQAGARVKIMDDEEFAYCWENFVYSEGQPFMPWYKFDDNYAFLHRTLKEILRNPMEAMYPHIFYFHFKNLRKAYGRNESWLCFTMEVVKHHSPVSWKRGVFRNQVDPETHCHAERCFLSWFCDDILSPNTNYEVTWYTSWSPCPECAGEVAEFLARHSNVNLTIFTARLYYFWDTDYQEGLRSLSQEGASVEIMGYKDFKYCWENFVYNDDEPFKPWKGLKYNFLFLDSKLQEILE

SEQ ID NO: 281 - protein, 382 aa, Homo sapiens
MNPQIRNPMERMYRDTFYDNFENEPILYGRSYTWLCYEVKIKRGRSNLLWDTGVFRGQVYFKPQYHAEMCFLSWFCGNQLPAYKCFQITWFVSWTPCPDCVAKLAEFLSEHPNVTLTISAARLYYYWERDYRRALCRLSQAGARVTIMDYEEFAYCWENFVYNEGQQFMPWYKFDENYAFLHRTLKEILRYLMDPDTFTFNFNNDPLVLRRRQTYLCYEVERLDNGTWVLMDQHMGFLCNEAKNLLCGFYGRHAELRFLDLVPSLQLDPAQIYRVTWFISWSPCFSWGCAGEVRAFLQENTHVRLRIFAARIYDYDPLYKEALQMLRDAGAQVSIMTYDEFEYCWDTFVYRQGCPFQPWDGLEEHSQALSGRLRAILQNQGN

SEQ ID NO: 282 - protein, 190 aa, Homo sapiens
MNPQIRNPMKAMYPGTFYFQFKNLWEANDRNETWLCFTVEGIKRRSVVSWKTGVFRNQVDSETHCHAERCFLSWFCDDILSPNTKYQVTWYTSWSPCPDCAGEVAEFLARHSNVNLTIFTARLYYFQYPCYQEGLRSLSQEGVAVEIMDYEDFKYCWENFVYNDNEPFKPWKGLKTNFRLLKRRLRESLQ

SEQ ID NO: 283 - protein, 199 aa, Homo sapiens
MEASPASGPRHLMDPHIFTSNFNNGIGRHKTYLCYEVERLDNGTSVKMDQHRGFLHNQAKNLLCGFYGRHAELRFLDLVPSLQLDPAQIYRVTWFISWSPCFSWGCAGEVRAFLQENTHVRLRIFAARIYDYDPLYKEALQMLRDAGAQVSIMTYDEFKHCWDTFVDHQGCPFQPWDGLDEHSQALSGRLRAILQNQGN

SEQ ID NO: 284 - protein, 200 aa, Homo sapiens
MALLTAETFRLQFNNKRRLRRPYYPRKALLCYQLTPQNGSTPTRGYFENKKKCHAEICFINEIKSMGLDETQCYQVTCYLTWSPCSSCAWELVDFIKAHDHLNLGIFASRLYYHWCKPQQKGLRLLCGSQVPVEVMGFPKFADCWENFVDHEKPLSFNPYKMLEELDKNSRAIKRRLERIKIPGVRAQGRYMDILCDAEV

SEQ ID NO: 285 - protein, 386 aa, Homo sapiens
MNPQIRNPMERMYRDTFYDNFENEPILYGRSYTWLCYEVKIKRGRSNLLWDTGVFRGPVLPKRQSNHRQEVYFRFENHAEMCFLSWFCGNRLPANRRFQITWFVSWNPCLPCVVKVTKFLAEHPNVTLTISAARLYYYRDRDWRWVLLRLHKAGARVKIMDYEDFAYCWENFVCNEGQPFMPWYKFDDNYASLHRTLKEILRNPMEAMYPHIFYFHFKNLLKACGRNESWLCFTMEVTKHHSAVFRKRGVFRNQVDPETHCHAERCFLSWFCDDILSPNTNYEVTWYTSWSPCPECAGEVAEFLARHSNVNLTIFTARLCYFWDTDYQEGLCSLSQEGASVKIMGYKDFVSCWKNFVYSDDEPFKPWKGLQTNFRLLKRRLREILQ

SEQ ID NO: 286 - protein, 236 aa, Homo sapiens
MTSEKGPSTGDPTLRRRIEPWEFDVFYDPRELRKEACLLYEIKWGMSRKIWRSSGKNTTNHVEVNFIKKFTSERDFHPSMSCSITWFLSWSPCWECSQAIREFLSRHPGVTLVIYVARLFWHMDQQNRQGLRDLVNSGVTIQIMRASEYYHCWRNFVNYPPGDEAHWPQYPPLWMMLYALELHCIILSLPPCLKISRRWQNHLTFFRLHLQNCHYQTIPPHILLATGLIHPSVAWR

SEQ ID NO: 287 - protein, 229 aa, Mus musculus
MSSETGPVAVDPTLRRRIEPHEFEVFFDPRELRKETCLLYEINWGGRHSVWRHTSQNTSNHVEVNFLEKFTTERYFRPNTRCSITWFLSWSPCGECSRAITEFLSRHPYVTLFIYIARLYHHTDQRNRQGLRDLISSGVTIQIMTEQEYCYCWRNFVNYPPSNEAYWPRYPHLWVKLYVLELYCIILGLPPCLKILRRKQPQLTFFTITLQTCHYQRIPPHLLWATGLK

SEQ ID NO: 288 - protein, 229 aa, Rattus norvegicus [sequence omitted]

SEQ ID NO: 289 - protein, 208 aa, Petromyzon marinus
MTDAEYVRIHEKLDIYTFKKQFFNNKKSVSHRCYVLFELKRRGERRACFWGYAVNKPQSGTERGIHAEIFSIRKVEEYLRDNPGQFTINWYSSWSPCADCAEKILEWYNQELRGNGHTLKIWACKLYYEKNARNQIGLWNLRDNGVGLNVMVSEHYQCCRKIFIQSSHNQLNENRWLEKTLKRAEKRRSELSIMIQVKILHTTKSPAV

SEQ ID NO: 290 - protein, 384 aa, Homo sapiens
MKPHFRNTVERMYRDTFSYNFYNRPILSRRNTVWLCYEVKTKGPSRPPLDAKIFRGQVYSELKYHPEMRFFHWFSKWRKLHRDQEYEVTWYISWSPCTKCTRDMATFLAEDPKVTLTIFVARLYYFWDPDYQEALRSLCQKRDGPRATMKIMNYDEFQHCWSKFVYSQRELFEPWNNLPKYYILLHIMLGEILRHSMDPPTFTFNFNNEPWVRGRHETYLCYEVERMHNDTWVLLNQRRGFLCNQAPHKHGFLEGRHAELCFLDVIPFWKLDLDQDYRVTCFTSWSPCFSCAQEMAKFISKNKHVSLCIFTARIYRRQGRCQEGLRTLAEAGAKISIMTYSEFKHCWDTFVDHQGCPFQPWDGLDEHSQDLSGRLRAILQNQEN

SEQ ID NO: 291 - protein, 184 aa, Homo sapiens
MDPPTFTFNFNNEPWVRGRHETYLCYEVERMHNDTWVLLNQRRGFLCNQAPHKHGFLEGRHAELCFLDVIPFWKLDLDQDYRVTCFTSWSPCFSCAQEMAKFISKNKHVSLCIFTARIYDDQGRCQEGLRTLAEAGAKISIMTYSEFKHCWDTFVDHQGCPFQPWDGLDEHSQDLSGRLRAILQ

SEQ ID NO: 292 - protein, 184 aa, Homo sapiens
MDPPTFTFNFNNEPWVRGRHETYLCYEVERMHNDTWVLLNQRRGFLCNQAPHKHGFLEGRHAELCFLDVIPFWKLDLDQDYRVTCFTSWSPCFSCAQEMAKFISKNKHVSLCIFTARIYRRQGRCQEGLRTLAEAGAKISIMTYSEFKHCWDTFVDHQGCPFQPWDGLDEHSQDLSGRLRAILQ

SEQ ID NO: 293 - protein, 1633 aa, Escherichia coli
MGSSHHHHHHMSSETGPVAVDPTLRRRIEPHEFEVFFDPRELRKETCLLYEINWGGRHSIWRHTSQNTNKHVEVNFIEKFTTERYFCPNTRCSITWFLSWSPCGECSRAITEFLSRYPHVTLFIYIARLYHHADPRNRQGLRDLISSGVTIQIMTEQESGYCWRNFVNYSPSNEAHWPRYPHLWVRLYVLELYCIILGLPPCLNILRRKQPQLTFFTIALQSCHYQRLPPHILWATGLKSGSETPGTSESATPESDKKYSIGLAIGTNSVGWAVITDEYKVPSKKFKVLGNTDRHSIKKNLIGALLFDSGETAEATRLKRTARRRYTRRKNRICYLQEIFSNEMAKVDDSFFHRLEESFLVEEDKKHERHPIFGNIVDEVAYHEKYPTIYHLRKKLVDSTDKADLRLIYLALAHMIKFRGHFLIEGDLNPDNSDVDKLFIQLVQTYNQLFEENPINASGVDAKAILSARLSKSRRLENLIAQLPGEKKNGLFGNLIALSLGLTPNFKSNFDLAEDAKLQLSKDTYDDDLDNLLAQIGDQYADLFLAAKNLSDAILLSDILRVNTEITKAPLSASMIKRYDEHHQDLTLLKALVRQQLPEKYKEIFFDQSKNGYAGYIDGGASQEEFYKFIKPILEKMDGTEELLVKLNREDLLRKQRTFDNGSIPHQIHLGELHAILRRQEDFYPFLKDNREKIEKILTFRIPYYVGPLARGNSRFAWMTRKSEETITPWNFEEVVDKGASAQSFIERMTNFDKNLPNEKVLPKHSLLYEYFTVYNELTKVKYVTEGMRKPAFLSGEQKKAIVDLLFKTNRKVTVKQLKEDYFKKIECFDSVEISGVEDRFNASLGTYHDLLKLLKDKDFLDNEENEDILEDIVLTLTLFEDREMIEERLKTYAHLFDDKVMKQLKRRRYTGWGRLSRKLINGIRDKQSGKTILDFLKSDGFANRNFMQLIHDDSLTFKEDIQKAQVSGQGDSLHEHIANLAGSPAIKKGILQTVKVVDELVKVMGRHKPENIVIEMARENQTTQKGQKNSRERMKRIEEGIKELGSQILKEHPVENTQLQNEKLYLYYLQNGRDMYVDQELDINRLSDYDVDAIVPQSFLKDDSIDNKVLTRSDKNRGKSDNVPSEEVVKKMKNYWRQLLNAKLITQRKFDNLTKAERGGLSELDKAGFIKRQLVETRQITKHVAQILDSRMNTKYDENDKLIREVKVITLKSKLVSDFRKDFQFYKVREINNYHHAHDAYLNAVVGTALIKKYPKLESEFVYGDYKVYDVRKMIAKSEQEIGKATAKYFFYSNIMNFFKTEITLANGEIRKRPLIETNGETGEIVWDKGRDFATVRKVLSMPQVNIVKKTEVQTGGFSKESILPKRNSDKLIARKKDWDPKKYGGFDSPTVAYSVLVVAKVEKGKSKKLKSVKELLGITIMERSSFEKNPIDFLEAKGYKEVKKDLLLKLPKYSLFELENGRKRMLASAGELQKGNELALPSKYVNFLYLASHYEKLKGSPEDNEQKQLFVEQHKHYLDELLEQISEFSKRVILADANLDKVLSAYNKHRDKPIREQAENLLHLFTLTNLGAPAAFKYFDTTIDRKRYTSTKEVLDATLIHQSITGLYETRIDLSQLGGDSGGSPKKKRKV

SEQ ID NO: 294 - protein, 1623 aa, Artificial sequence
  Synthetic polypeptide
MSSETGPVAVDPTLRRRIEPHEFEVFFDPRELRKETCLLYEINWGGRHSIWRHTSQNTNKHVEVNFIEKFTTERYFCPNTRCSITWFLSWSPCGECSRAITEFLSRYPHVTLFIYIARLYHHADPRNRQGLRDLISSGVTIQIMTEQESGYCWRNFVNYSPSNEAHWPRYPHLWVRLYVLELYCLLLGLPPCLNILRRKQPQLTFFTIALQSCHYQRLPPHILWATGLKSGSETPGTSESATPESDKKYSIGLAIGTNSVGWAVITDEYKVPSKKFKVLGNTDRHSIKKNLIGALLFDSGETAEATRLKRTARRRYTRRKNRICYLQEIFSNEMAKVDDSFFHRLEESFLVEEDKKHERHPIFGNIVDEVAYHEKYPTIYHLRKKLVDSTDKADLRLIYLALAHMIKFRGHFLIEGDLNPDNSDVDKLFIQLVQTYNQLFEENPINASGVDAKAILSARLSKSRRLENLIAQLPGEKKNGLFGNLIALSLGLTPNFKSNFDLAEDAKLQLSKDTYDDDLDNLLAQIGDQYADLFLAAKNLSDAILLSDILRVNTEITKAPLSASMIKRYDEHHQDLTLLKALVRQQLPEKYKEIFFDQSKNGYAGYIDGGASQEEFYKFIKPILEKMDGTEELLVKLNREDLLRKQRTFDNGSIPHQIHLGELHAILRRQEDFYPFLKDNREKIEKILTFRIPYYVGPLARGNSRFAWMTRKSEETITPWNFEEVVDKGASAQSFIERMTNFDKNLPNEKVLPKHSLLYEYFTVYNELTKVKYVTEGMRKPAFLSGEQKKAIVDLLFKTNRKVTVKQLKEDYFKKIECFDSVEISGVEDRFNASLGTYHDLLKLLKDKDFLDNEENEDILEDIVLTLTLFEDREMIEERLKTYAHLFDDKVMKQLKRRRYTGWGRLSRKLINGIRDKQSGKTILDFLKSDGFANRNFMQLIHDDSLTFKEDIQKAQVSGQGDSLHEHIANLAGSPAIKKGILQTVKVVDELVKVMGRHKPENIVIEMARENQTTQKGQKNSRERMKRIEEGIKELGSQILKEHPVENTQLQNEKLYLYYLQNGRDMYVDQELDINRLSDYDVDAIVPQSFLKDDSIDNKVLTRSDKNRGKSDNVPSEEVVKKMKNYWRQLLNAKLITQRKFDNLTKAERGGLSELDKAGFIKRQLVETRQITKHVAQILDSRMNTKYDENDKLIREVKVITLKSKLVSDFRKDFQFYKVREINNYHHAHDAYLNAVVGTALIKKYPKLESEFVYGDYKVYDVRKMIAKSEQEIGKATAKYFFYSNIMNFFKTEITLANGEIRKRPLIETNGETGEIVWDKGRDFATVRKVLSMPQVNIVKKTEVQTGGFSKESILPKRNSDKLIARKKDWDPKKYGGFDSPTVAYSVLVVAKVEKGKSKKLKSVKELLGITIMERSSFEKNPIDFLEAKGYKEVKKDLLLKLPKYSLFELENGRKRMLASAGELQKGNELALPSKYVNFLYLASHYEKLKGSPEDNEQKQLFVEQHKHYLDELLEQISEFSKRVILADANLDKVLSAYNKHRDKPIREQAENLLHLFTLTNLGAPAAFKYFDTTIDRKRYTSTKEVLDATLIHQSITGLYETRIDLSQLGGDSGGSPKKKRKV

SEQ ID NO: 295 - protein, 1630 aa, Artificial sequence
  Synthetic polypeptide
MTSEKGPSTGDPTLRRRIEPWEFDVFYDPRELRKEACLLYEIKWGMSRKIWRSSGKNTTNHVEVNFIKKFTSERDFHPSMSCSITWFLSWSPCWECSQAIREFLSRHPGVTLVIYVARLFWHMDQQNRQGLRDLVNSGVTIQIMRASEYYHCWRNFVNYPPGDEAHWPQYPPLWMMLYALELHCIILSLPPCLKISRRWQNHLTFFRLHLQNCHYQTIPPHILLATGLIHPSVAWRSGSETPGTSESATPESDKKYSIGLAIGTNSVGWAVITDEYKVPSKKFKVLGNTDRHSIKKNLIGALLFDSGETAEATRLKRTARRRYTRRKNRICYLQEIFSNEMAKVDDSFFHRLEESFLVEEDKKHERHPIFGNIVDEVAYHEKYPTIYHLRKKLVDSTDKADLRLIYLALAHMIKFRGHFLIEGDLNPDNSDVDKLFIQLVQTYNQLFEENPINASGVDAKAILSARLSKSRRLENLIAQLPGEKKNGLFGNLIALSLGLTPNFKSNFDLAEDAKLQLSKDTYDDDLDNLLAQIGDQYADLFLAAKNLSDAILLSDILRVNTEITKAPLSASMIKRYDEHHQDLTLLKALVRQQLPEKYKEIFFDQSKNGYAGYIDGGASQEEFYKFIKPILEKMDGTEELLVKLNREDLLRKQRTFDNGSIPHQIHLGELHAILRRQEDFYPFLKDNREKIEKILTFRIPYYVGPLARGNSRFAWMTRKSEETITPWNFEEVVDKGASAQSFIERMTNFDKNLPNEKVLPKHSLLYEYFTVYNELTKVKYVTEGMRKPAFLSGEQKKAIVDLLFKTNRKVTVKQLKEDYFKKIECFDSVEISGVEDRFNASLGTYHDLLKIIKDKDFLDNEENEDILEDIVLTLTLFEDREMIEERLKTYAHLFDDKVMKQLKRRRYTGWGRLSRKLINGIRDKQSGKTILDFLKSDGFANRNFMQLIHDDSLTFKEDIQKAQVSGQGDSLHEHIANLAGSPAIKKGILQTVKVVDELVKVMGRHKPENIVIEMARENQTTQKGQKNSRERMKRIEEGIKELGSQILKEHPVENTQLQNEKLYLYYLQNGRDMYVDQELDINRLSDYDVDAIVPQSFLKDDSIDNKVLTRSDKNRGKSDNVPSEEVVKKMKNYWRQLLNAKLITQRKFDNLTKAERGGLSELDKAGFIKRQLVETRQITKHVAQILDSRMNTKYDENDKLIREVKVITLKSKLVSDFRKDFQFYKVREINNYHHAHDAYLNAVVGTALIKKYPKLESEFVYGDYKVYDVRKMIAKSEQEIGKATAKYFFYSNIMNFFKTEITLANGEIRKRPLIETNGETGEIVWDKGRDFATVRKVLSMPQVNIVKKTEVQTGGFSKESILPKRNSDKLIARKKDWDPKKYGGFDSPTVAYSVLVVAKVEKGKSKKLKSVKELLGITIMERSSFEKNPIDFLEAKGYKEVKKDLIIKLPKYSLFELENGRKRMLASAGELQKGNELALPSKYVNFLYLASHYEKLKGSPEDNEQKQLFVEQHKHYLDEIIEQISEFSKRVILADANLDKVLSAYNKHRDKPIREQAENIIHLFTLTNLGAPAAFKYFDTTIDRKRYTSTKEVLDATLIHQSITGLYETRIDLSQLGGDSGGSPKKKRKV

SEQ ID NO: 296 - protein, 1710 aa, Artificial sequence
  Synthetic polypeptide
MSSETGPVAVDPTLRRRIEPHEFEVFFDPRELRKETCLLYEINWGGRHSIWRHTSQNTNKHVEVNFIEKFTTERYFCPNTRCSITWFLSWSPCGECSRAITEFLSRYPHVTLFIYIARLYHHADPRNRQGLRDLISSGVTIQIMTEQESGYCWRNFVNYSPSNEAHWPRYPHLWVRLYVLELYCLLLGLPPCLNILRRKQPQLTFFTIALQSCHYQRLPPHILWATGLKSGSETPGTSESATPESDKKYSIGLAIGTNSVGWAVITDEYKVPSKKFKVLGNTDRHSIKKNLIGALLFDSGETAEATRLKRTARRRYTRRKNRICYLQEIFSNEMAKVDDSFFHRLEESFLVEEDKKHERHPIFGNIVDEVAYHEKYPTIYHLRKKLVDSTDKADLRLIYLALAHMIKFRGHFLIEGDLNPDNSDVDKLFIQLVQTYNQLFEENPINASGVDAKAILSARLSKSRRLENLIAQLPGEKKNGLFGNLIALSLGLTPNFKSNFDLAEDAKLQLSKDTYDDDLDNLLAQIGDQYADLFLAAKNLSDAILLSDILRVNTEITKAPLSASMIKRYDEHHQDLTLLKALVRQQLPEKYKEIFFDQSKNGYAGYIDGGASQEEFYKFIKPILEKMDGTEELLVKLNREDLLRKQRTFDNGSIPHQIHLGELHAILRRQEDFYPFLKDNREKIEKILTFRIPYYVGPLARGNSRFAWMTRKSEETITPWNFEEVVDKGASAQSFIERMTNFDKNLPNEKVLPKHSLLYEYFTVYNELTKVKYVTEGMRKPAFLSGEQKKAIVDLLFKTNRKVTVKQLKEDYFKKIECFDSVEISGVEDRFNASLGTYHDLLKLLKDKDFLDNEENEDILEDIVLTLTLFEDREMIEERLKTYAHLFDDKVMKQLKRRRYTGWGRLSRKLINGIRDKQSGKTILDFLKSDGFANRNFMQLIHDDSLTFKEDIQKAQVSGQGDSLHEHIANLAGSPAIKKGILQTVKVVDELVKVMGRHKPENIVIEMARENQTTQKGQKNSRERMKRIEEGIKELGSQILKEHPVENTQLQNEKLYLYYLQNGRDMYVDQELDINRLSDYDVDAIVPQSFLKDDSIDNKVLTRSDKNRGKSDNVPSEEVVKKMKNYWRQLLNAKLITQRKFDNLTKAERGGLSELDKAGFIKRQLVETRQITKHVAQILDSRMNTKYDENDKLIREVKVITLKSKLVSDFRKDFQFYKVREINNYHHAHDAYLNAVVGTALIKKYPKLESEFVYGDYKVYDVRKMIAKSEQEIGKATAKYFFYSNIMNFFKTEITLANGEIRKRPLIETNGETGEIVWDKGRDFATVRKVLSMPQVNIVKKTEVQTGGFSKESILPKRNSDKLIARKKDWDPKKYGGFDSPTVAYSVLVVAKVEKGKSKKLKSVKELLGITIMERSSFEKNPIDFLEAKGYKEVKKDLLLKLPKYSLFELENGRKRMLASAGELQKGNELALPSKYVNFLYLASHYEKLKGSPEDNEQKQLFVEQHKHYLDELLEQISEFSKRVILADANLDKVLSAYNKHRDKPIREQAENLLHLFTLTNLGAPAAFKYFDTTIDRKRYTSTKEVLDATLIHQSITGLYETRIDLSQLGGDSGGSTNLSDLLEKETGKQLVIQESILMLPEEVEEVIGNKPESDILVHTAYDESTDENVMLLTSDAPEYKPWALVIQDSNGENKIKMLSGGSPKKKRKV

SEQ ID NO: 297 - protein, 1710 aa, Artificial sequence
  Synthetic polypeptide
MSSETGPVAVDPTLRRRIEPHEFEVFFDPRELRKETCLLYEINWGGRHSIWRHTSQNTNKHVEVNFIEKFTTERYFCPNTRCSITWFLSWSPCGECSRAITEFLSRYPHVTLFIYIARLYHHADPRNRQGLRDLISSGVTIQIMTEQESGYCWRNFVNYSPSNEAHWPRYPHLWVRLYVLELYCLLLGLPPCLNILRRKQPQLTFFTIALQSCHYQRLPPHILWATGLKSGSETPGTSESATPESDKKYSIGLAIGTNSVGWAVITDEYKVPSKKFKVLGNTDRHSIKKNLIGALLFDSGETAEATRLKRTARRRYTRRKNRICYLQEIFSNEMAKVDDSFFHRLEESFLVEEDKKHERHPIFGNIVDEVAYHEKYPTIYHLRKKLVDSTDKADLRLIYLALAHMIKFRGHFLIEGDLNPDNSDVDKLFIQLVQTYNQLFEENPINASGVDAKAILSARLSKSRRLENLIAQLPGEKKNGLFGNLIALSLGLTPNFKSNFDLAEDAKLQLSKDTYDDDLDNLLAQIGDQYADLFLAAKNLSDAILLSDILRVNTEITKAPLSASMIKRYDEHHQDLTLLKALVRQQLPEKYKEIFFDQSKNGYAGYIDGGASQEEFYKFIKPILEKMDGTEELLVKLNREDLLRKQRTFDNGSIPHQIHLGELHAILRRQEDFYPFLKDNREKIEKILTFRIPYYVGPLARGNSRFAWMTRKSEETITPWNFEEVVDKGASAQSFIERMTNFDKNLPNEKVLPKHSLLYEYFTVYNELTKVKYVTEGMRKPAFLSGEQKKAIVDLLFKTNRKVTVKQLKEDYFKKIECFDSVEISGVEDRFNASLGTYHDLLKLLKDKDFLDNEENEDILEDIVLTLTLFEDREMIEERLKTYAHLFDDKVMKQLKRRRYTGWGRLSRKLINGIRDKQSGKTILDFLKSDGFANRNFMQLIHDDSLTFKEDIQKAQVSGQGDSLHEHIANLAGSPAIKKGILQTVKVVDELVKVMGRHKPENIVIEMARENQTTQKGQKNSRERMKRIEEGIKELGSQILKEHPVENTQLQNEKLYLYYLQNGRDMYVDQELDINRLSDYDVDHIVPQSFLKDDSIDNKVLTRSDKNRGKSDNVPSEEVVKKMKNYWRQLLNAKLITQRKFDNLTKAERGGLSELDKAGFIKRQLVETRQITKHVAQILDSRMNTKYDENDKLIREVKVITLKSKLVSDFRKDFQFYKVREINNYHHAHDAYLNAVVGTALIKKYPKLESEFVYGDYKVYDVRKMIAKSEQEIGKATAKYFFYSNIMNFFKTEITLANGEIRKRPLIETNGETGEIVWDKGRDFATVRKVLSMPQVNIVKKTEVQTGGFSKESILPKRNSDKLIARKKDWDPKKYGGFDSPTVAYSVLVVAKVEKGKSKKLKSVKELLGITIMERSSFEKNPIDFLEAKGYKEVKKDLLLKLPKYSLFELENGRKRMLASAGELQKGNELALPSKYVNFLYLASHYEKLKGSPEDNEQKQLFVEQHKHYLDELLEQISEFSKRVILADANLDKVLSAYNKHRDKPIREQAENLLHLFTLTNLGAPAAFKYFDTTIDRKRYTSTKEVLDATLIHQSITGLYETRIDLSQLGGDSGGSTNLSDLLEKETGKQLVIQESILMLPEEVEEVIGNKPESDILVHTAYDESTDENVMLLTSDAPEYKPWALVIQDSNGENKIKMLSGGSPKKKRKV

SEQ ID NO: 298 - protein, 1679 aa, Artificial sequence
  Synthetic polypeptide
MTDAEYVRIHEKLDIYTFKKQFFNNKKSVSHRCYVLFELKRRGERRACFWGYAVNKPQSGTERGIHAEIFSIRKVEEYLRDNPGQFTINWYSSWSPCADCAEKILEWYNQELRGNGHTLKIWACKLYYEKNARNQIGLWNLRDNGVGLNVMVSEHYQCCRKIFIQSSHNQLNENRWLEKTLKRAEKRRSELSIMIQVKILHTTKSPAVSGSETPGTSESATPESDKKYSIGLAIGTNSVGWAVITDEYKVPSKKFKVLGNTDRHSIKKNLIGALLFDSGETAEATRLKRTARRRYTRRKNRICYLQEIFSNEMAKVDDSFFHRLEESFLVEEDKKHERHPIFGNIVDEVAYHEKYPTIYHLRKKLVDSTDKADLRLIYLALAHMIKFRGHFLIEGDLNPDNSDVDKLFIQLVQTYNQLFEENPINASGVDAKAILSARLSKSRRLENLIAQLPGEKKNGLFGNLIALSLGLTPNFKSNFDLAEDAKLQLSKDTYDDDLDNLLAQIGDQYADLFLAAKNLSDAILLSDILRVNTEITKAPLSASMIKRYDEHHQDLTLLKALVRQQLPEKYKEIFFDQSKNGYAGYIDGGASQEEFYKFIKPILEKMDGTEELLVKLNREDLLRKQRTFDNGSIPHQIHLGELHAILRRQEDFYPFLKDNREKIEKILTFRIPYYVGPLARGNSRFAWMTRKSEETITPWNFEEVVDKGASAQSFIERMTNFDKNLPNEKVLPKHSLLYEYFTVYNELTKVKYVTEGMRKPAFLSGEQKKAIVDLLFKTNRKVTVKQLKEDYFKKIECFDSVEISGVEDRFNASLGTYHDLLKIIKDKDFLDNEENEDILEDIVLTLTLFEDREMIEERLKTYAHLFDDKVMKQLKRRRYTGWGRLSRKLINGIRDKQSGKTILDFLKSDGFANRNFMQLIHDDSLTFKEDIQKAQVSGQGDSLHEHIANLAGSPAIKKGILQTVKVVDELVKVMGRHKPENIVIEMARENQTTQKGQKNSRERMKRIEEGIKELGSQILKEHPVENTQLQNEKLYLYYLQNGRDMYVDQELDINRLSDYDVDAIVPQSFLKDDSIDNKVLTRSDKNRGKSDNVPSEEVVKKMKNYWRQLLNAKLITQRKFDNLTKAERGGLSELDKAGFIKRQLVETRQITKHVAQILDSRMNTKYDENDKLIREVKVITLKSKLVSDFRKDFQFYKVREINNYHHAHDAYLNAVVGTALIKKYPKLESEFVYGDYKVYDVRKMIAKSEQEIGKATAKYFFYSNIMNFFKTEITLANGEIRKRPLIETNGETGEIVWDKGRDFATVRKVLSMPQVNIVKKTEVQTGGFSKESILPKRNSDKLIARKKDWDPKKYGGFDSPTVAYSVLVVAKVEKGKSKKLKSVKELLGITIMERSSFEKNPIDFLEAKGYKEVKKDLIIKLPKYSLFELENGRKRMLASAGELQKGNELALPSKYVNFLYLASHYEKLKGSPEDNEQKQLFVEQHKHYLDEIIEQISEFSKRVILADANLDKVLSAYNKHRDKPIREQAENIIHLFTLTNLGAPAAFKYFDTTIDRKRYTSTKEVLDATLIHQSITGLYETRIDLSQLGGDSGGSMTNLSDIIEKETGKQLVIQESILMLPEEVEEVIGNKPESDILVHTAYDESTDENVMLLTSDAPEYKPWALVIQDSNGENKIKML

SEQ ID NO: 299 - protein, 1689 aa, Artificial sequence
  Synthetic polypeptide
MTDAEYVRIHEKLDIYTFKKQFFNNKKSVSHRCYVLFELKRRGERRACFWGYAVNKPQSGTERGIHAEIFSIRKVEEYLRDNPGQFTINWYSSWSPCADCAEKILEWYNQELRGNGHTLKIWACKLYYEKNARNQIGLWNLRDNGVGLNVMVSEHYQCCRKIFIQSSHNQLNENRWLEKTLKRAEKRRSELSIMIQVKILHTTKSPAVSGSETPGTSESATPESDKKYSIGLAIGTNSVGWAVITDEYKVPSKKFKVLGNTDRHSIKKNLIGALLFDSGETAEATRLKRTARRRYTRRKNRICYLQEIFSNEMAKVDDSFFHRLEESFLVEEDKKHERHPIFGNIVDEVAYHEKYPTIYHLRKKLVDSTDKADLRLIYLALAHMIKFRGHFLIEGDLNPDNSDVDKLFIQLVQTYNQLFEENPINASGVDAKAILSARLSKSRRLENLIAQLPGEKKNGLFGNLIALSLGLTPNFKSNFDLAEDAKLQLSKDTYDDDLDNLLAQIGDQYADLFLAAKNLSDAILLSDILRVNTEITKAPLSASMIKRYDEHHQDLTLLKALVRQQLPEKYKEIFFDQSKNGYAGYIDGGASQEEFYKFIKPILEKMDGTEELLVKLNREDLLRKQRTFDNGSIPHQIHLGELHAILRRQEDFYPFLKDNREKIEKILTFRIPYYVGPLARGNSRFAWMTRKSEETITPWNFEEVVDKGASAQSFIERMTNFDKNLPNEKVLPKHSLLYEYFTVYNELTKVKYVTEGMRKPAFLSGEQKKAIVDLLFKTNRKVTVKQLKEDYFKKIECFDSVEISGVEDRFNASLGTYHDLLKIIKDKDFLDNEENEDILEDIVLTLTLFEDREMIEERLKTYAHLFDDKVMKQLKRRRYTGWGRLSRKLINGIRDKQSGKTILDFLKSDGFANRNFMQLIHDDSLTFKEDIQKAQVSGQGDSLHEHIANLAGSPAIKKGILQTVKVVDELVKVMGRHKPENIVIEMARENQTTQKGQKNSRERMKRIEEGIKELGSQILKEHPVENTQLQNEKLYLYYLQNGRDMYVDQELDINRLSDYDVDHIVPQSFLKDDSIDNKVLTRSDKNRGKSDNVPSEEVVKKMKNYWRQLLNAKLITQRKFDNLTKAERGGLSELDKAGFIKRQLVETRQITKHVAQILDSRMNTKYDENDKLIREVKVITLKSKLVSDFRKDFQFYKVREINNYHHAHDAYLNAVVGTALIKKYPKLESEFVYGDYKVYDVRKMIAKSEQEIGKATAKYFFYSNIMNFFKTEITLANGEIRKRPLIETNGETGEIVWDKGRDFATVRKVLSMPQVNIVKKTEVQTGGFSKESILPKRNSDKLIARKKDWDPKKYGGFDSPTVAYSVLVVAKVEKGKSKKLKSVKELLGITIMERSSFEKNPIDFLEAKGYKEVKKDLIIKLPKYSLFELENGRKRMLASAGELQKGNELALPSKYVNFLYLASHYEKLKGSPEDNEQKQLFVEQHKHYLDEIIEQISEFSKRVILADANLDKVLSAYNKHRDKPIREQAENIIHLFTLTNLGAPAAFKYFDTTIDRKRYTSTKEVLDATLIHQSITGLYETRIDLSQLGGDSGGSTNLSDIIEKETGKQLVIQESILMLPEEVEEVIGNKPESDILVHTAYDESTDENVMLLTSDAPEYKPWALVIQDSNGENKIKMLSGGSPKKKRKV

SEQ ID NO: 300 - protein, 1655 aa, Artificial sequence
  Synthetic polypeptide
MDPPTFTFNFNNEPWVRGRHETYLCYEVERMHNDTWVLLNQRRGFLCNQAPHKHGFLEGRHAELCFLDVIPFWKLDLDQDYRVTCFTSWSPCFSCAQEMAKFISKNKHVSLCIFTARIYDDQGRCQEGLRTLAEAGAKISIMTYSEFKHCWDTFVDHQGCPFQPWDGLDEHSQDLSGRLRAILQSGSETPGTSESATPESDKKYSIGLAIGTNSVGWAVITDEYKVPSKKFKVLGNTDRHSIKKNLIGALLFDSGETAEATRLKRTARRRYTRRKNRICYLQEIFSNEMAKVDDSFFHRLEESFLVEEDKKHERHPIFGNIVDEVAYHEKYPTIYHLRKKLVDSTDKADLRLIYLALAHMIKFRGHFLIEGDLNPDNSDVDKLFIQLVQTYNQLFEENPINASGVDAKAILSARLSKSRRLENLIAQLPGEKKNGLFGNLIALSLGLTPNFKSNFDLAEDAKLQLSKDTYDDDLDNLLAQIGDQYADLFLAAKNLSDAILLSDILRVNTEITKAPLSASMIKRYDEHHQDLTLLKALVRQQLPEKYKEIFFDQSKNGYAGYIDGGASQEEFYKFIKPILEKMDGTEELLVKLNREDLLRKQRTFDNGSIPHQIHLGELHAILRRQEDFYPFLKDNREKIEKILTFRIPYYVGPLARGNSRFAWMTRKSEETITPWNFEEVVDKGASAQSFIERMTNFDKNLPNEKVLPKHSLLYEYFTVYNELTKVKYVTEGMRKPAFLSGEQKKAIVDLLFKTNRKVTVKQLKEDYFKKIECFDSVEISGVEDRFNASLGTYHDLLKIIKDKDFLDNEENEDILEDIVLTLTLFEDREMIEERLKTYAHLFDDKVMKQLKRRRYTGWGRLSRKLINGIRDKQSGKTILDFLKSDGFANRNFMQLIHDDSLTFKEDIQKAQVSGQGDSLHEHIANLAGSPAIKKGILQTVKVVDELVKVMGRHKPENIVIEMARENQTTQKGQKNSRERMKRIEEGIKELGSQILKEHPVENTQLQNEKLYLYYLQNGRDMYVDQELDINRLSDYDVDAIVPQSFLKDDSIDNKVLTRSDKNRGKSDNVPSEEVVKKMKNYWRQLLNAKLITQRKFDNLTKAERGGLSELDKAGFIKRQLVETRQITKHVAQILDSRMNTKYDENDKLIREVKVITLKSKLVSDFRKDFQFYKVREINNYHHAHDAYLNAVVGTALIKKYPKLESEFVYGDYKVYDVRKMIAKSEQEIGKATAKYFFYSNIMNFFKTEITLANGEIRKRPLIETNGETGEIVWDKGRDFATVRKVLSMPQVNIVKKTEVQTGGFSKESILPKRNSDKLIARKKDWDPKKYGGFDSPTVAYSVLVVAKVEKGKSKKLKSVKELLGITIMERSSFEKNPIDFLEAKGYKEVKKDLIIKLPKYSLFELENGRKRMLASAGELQKGNELALPSKYVNFLYLASHYEKLKGSPEDNEQKQLFVEQHKHYLDEIIEQISEFSKRVILADANLDKVLSAYNKHRDKPIREQAENIIHLFTLTNLGAPAAFKYFDTTIDRKRYTSTKEVLDATLIHQSITGLYETRIDLSQLGGDSGGSMTNLSDIIEKETGKQLVIQESILMLPEEVEEVIGNKPESDILVHTAYDESTDENVMLLTSDAPEYKPWALVIQDSNGENKIKML

SEQ ID NO: 301 - protein, 1665 aa, Artificial sequence
  Synthetic polypeptide
MDPPTFTFNFNNEPWVRGRHETYLCYEVERMHNDTWVLLNQRRGFLCNQAPHKHGFLEGRHAELCFLDVIPFWKLDLDQDYRVTCFTSWSPCFSCAQEMAKFISKNKHVSLCIFTARIYDDQGRCQEGLRTLAEAGAKISIMTYSEFKHCWDTFVDHQGCPFQPWDGLDEHSQDLSGRLRAILQSGSETPGTSESATPESDKKYSIGLAIGTNSVGWAVITDEYKVPSKKFKVLGNTDRHSIKKNLIGALLFDSGETAEATRLKRTARRRYTRRKNRICYLQEIFSNEMAKVDDSFFHRLEESFLVEEDKKHERHPIFGNIVDEVAYHEKYPTIYHLRKKLVDSTDKADLRLIYLALAHMIKFRGHFLIEGDLNPDNSDVDKLFIQLVQTYNQLFEENPINASGVDAKAILSARLSKSRRLENLIAQLPGEKKNGLFGNLIALSLGLTPNFKSNFDLAEDAKLQLSKDTYDDDLDNLLAQIGDQYADLFLAAKNLSDAILLSDILRVNTEITKAPLSASMIKRYDEHHQDLTLLKALVRQQLPEKYKEIFFDQSKNGYAGYIDGGASQEEFYKFIKPILEKMDGTEELLVKLNREDLLRKQRTFDNGSIPHQIHLGELHAILRRQEDFYPFLKDNREKIEKILTFRIPYYVGPLARGNSRFAWMTRKSEETITPWNFEEVVDKGASAQSFIERMTNFDKNLPNEKVLPKHSLLYEYFTVYNELTKVKYVTEGMRKPAFLSGEQKKAIVDLLFKTNRKVTVKQLKEDYFKKIECFDSVEISGVEDRFNASLGTYHDLLKIIKDKDFLDNEENEDILEDIVLTLTLFEDREMIEERLKTYAHLFDDKVMKQLKRRRYTGWGRLSRKLINGIRDKQSGKTILDFLKSDGFANRNFMQLIHDDSLTFKEDIQKAQVSGQGDSLHEHIANLAGSPAIKKGILQTVKVVDELVKVMGRHKPENIVIEMARENQTTQKGQKNSRERMKRIEEGIKELGSQILKEHPVENTQLQNEKLYLYYLQNGRDMYVDQELDINRLSDYDVDHIVPQSFLKDDSIDNKVLTRSDKNRGKSDNVPSEEVVKKMKNYWRQLLNAKLITQRKFDNLTKAERGGLSELDKAGFIKRQLVETRQITKHVAQILDSRMNTKYDENDKLIREVKVITLKSKLVSDFRKDFQFYKVREINNYHHAHDAYLNAVVGTALIKKYPKLESEFVYGDYKVYDVRKMIAKSEQEIGKATAKYFFYSNIMNFFKTEITLANGEIRKRPLIETNGETGEIVWDKGRDFATVRKVLSMPQVNIVKKTEVQTGGFSKESILPKRNSDKLIARKKDWDPKKYGGFDSPTVAYSVLVVAKVEKGKSKKLKSVKELLGITIMERSSFEKNPIDFLEAKGYKEVKKDLIIKLPKYSLFELENGRKRMLASAGELQKGNELALPSKYVNFLYLASHYEKLKGSPEDNEQKQLFVEQHKHYLDEIIEQISEFSKRVILADANLDKVLSAYNKHRDKPIREQAENIIHLFTLTNLGAPAAFKYFDTTIDRKRYTSTKEVLDATLIHQSITGLYETRIDLSQLGGDSGGSTNLSDIIEKETGKQLVIQESILMLPEEVEEVIGNKPESDILVHTAYDESTDENVMLLTSDAPEYKPWALVIQDSNGENKIKMLSGGSPKKKRKV

SEQ ID NO: 302 - protein, 1665 aa, Artificial sequence
  Synthetic polypeptide
MDPPTFTFNFNNEPWVRGRHETYLCYEVERMHNDTWVLLNQRRGFLCNQAPHKHGFLEGRHAELCFLDVIPFWKLDLDQDYRVTCFTSWSPCFSCAQEMAKFISKNKHVSLCIFTARIYRRQGRCQEGLRTLAEAGAKISIMTYSEFKHCWDTFVDHQGCPFQPWDGLDEHSQDLSGRLRAILQSGSETPGTSESATPESDKKYSIGLAIGTNSVGWAVITDEYKVPSKKFKVLGNTDRHSIKKNLIGALLFDSGETAEATRLKRTARRRYTRRKNRICYLQEIFSNEMAKVDDSFFHRLEESFLVEEDKKHERHPIFGNIVDEVAYHEKYPTIYHLRKKLVDSTDKADLRLIYLALAHMIKFRGHFLIEGDLNPDNSDVDKLFIQLVQTYNQLFEENPINASGVDAKAILSARLSKSRRLENLIAQLPGEKKNGLFGNLIALSLGLTPNFKSNFDLAEDAKLQLSKDTYDDDLDNLLAQIGDQYADLFLAAKNLSDAILLSDILRVNTEITKAPLSASMIKRYDEHHQDLTLLKALVRQQLPEKYKEIFFDQSKNGYAGYIDGGASQEEFYKFIKPILEKMDGTEELLVKLNREDLLRKQRTFDNGSIPHQIHLGELHAILRRQEDFYPFLKDNREKIEKILTFRIPYYVGPLARGNSRFAWMTRKSEETITPWNFEEVVDKGASAQSFIERMTNFDKNLPNEKVLPKHSLLYEYFTVYNELTKVKYVTEGMRKPAFLSGEQKKAIVDLLFKTNRKVTVKQLKEDYFKKIECFDSVEISGVEDRFNASLGTYHDLLKIIKDKDFLDNEENEDILEDIVLTLTLFEDREMIEERLKTYAHLFDDKVMKQLKRRRYTGWGRLSRKLINGIRDKQSGKTILDFLKSDGFANRNFMQLIHDDSLTFKEDIQKAQVSGQGDSLHEHIANLAGSPAIKKGILQTVKVVDELVKVMGRHKPENIVIEMARENQTTQKGQKNSRERMKRIEEGIKELGSQILKEHPVENTQLQNEKLYLYYLQNGRDMYVDQELDINRLSDYDVDHIVPQSFLKDDSIDNKVLTRSDKNRGKSDNVPSEEVVKKMKNYWRQLLNAKLITQRKFDNLTKAERGGLSELDKAGFIKRQLVETRQITKHVAQILDSRMNTKYDENDKLIREVKVITLKSKLVSDFRKDFQFYKVREINNYHHAHDAYLNAVVGTALIKKYPKLESEFVYGDYKVYDVRKMIAKSEQEIGKATAKYFFYSNIMNFFKTEITLANGEIRKRPLIETNGETGEIVWDKGRDFATVRKVLSMPQVNIVKKTEVQTGGFSKESILPKRNSDKLIARKKDWDPKKYGGFDSPTVAYSVLVVAKVEKGKSKKLKSVKELLGITIMERSSFEKNPIDFLEAKGYKEVKKDLIIKLPKYSLFELENGRKRMLASAGELQKGNELALPSKYVNFLYLASHYEKLKGSPEDNEQKQLFVEQHKHYLDEIIEQISEFSKRVILADANLDKVLSAYNKHRDKPIREQAENIIHLFTLTNLGAPAAFKYFDTTIDRKRYTSTKEVLDATLIHQSITGLYETRIDLSQLGGDSGGSTNLSDIIEKETGKQLVIQESILMLPEEVEEVIGNKPESDILVHTAYDESTDENVMLLTSDAPEYKPWALVIQDSNGENKIKMLSGGSPKKKRKV

SEQ ID NO: 303 - protein, 198 aa, Homo sapiens [sequence omitted]

SEQ ID NO: 304 - protein, 84 aa, Bacillus phage PBS2
MTNLSDIIEKETGKQLVIQESILMLPEEVEEVIGNKPESDILVHTAYDESTDENVMLLTSDAPEYKPWALVIQDSNGENKIKML

SEQ ID NO: 305 - protein, 181 aa, Erwinia tasmaniensis
MASRGVNKVILVGNLGQDPEVRYMPNGGAVANITLATSESWRDKQTGETKEKTEWHRVVLFGKLAEVAGEYLRKGSQVYIEGALQTRKWTDQAGVEKYTTEVVVNVGGTMQMLGGRSQGGGASAGGQNGGSNNGWGQPQQPQGGNQFSGGAQQQARPQQQPQQNNAPANNEPPIDFDDDIP

SEQ ID NO: 306 - protein, 209 aa, Artificial sequence
  Synthetic polypeptide
MAGAQDFVPHTADLAELAAAAGECRGCGLYRDATQAVFGAGGRSARIMMIGEQPGDKEDLAGLPFVGPAGRLLDRALEAADIDRDALYVTNAVKHFKFTRAAGGKRRIHKTPSRTEVVACRPWLIAEMTSVEPDVVVLLGATAAKALLGNDFRVTQHRGEVLHVDDVPGDPALVATVHPSSLLRGPKEERESAFAGLVDDLRVAADVRP

SEQ ID NO: 307 - protein, 313 aa, Artificial sequence
  Synthetic polypeptide
MIGQKTLYSFFSPSPARKRHAPSPEPAVQGTGVAGVPEESGDAAAIPAKKAPAGQEEPGTPPSSPLSAEQLDRIQRNKAAALLRLAARNVPVGFGESWKKHLSGEFGKPYFIKLMGFVAEERKHYTVYPPPHQVFTWTQMCDIKDVKVVILGQEPYHGPNQAHGLCFSVQRPVPPPPSLENIYKELSTDIEDFVHPGHGDLSGWAKQGVLLLNAVLTVRAHQANSHKERGWEQFTDAVVSWLNQNSNGLVFLLWGSYAQKKGSAIDRKRHHVLQTAHPSPLSVYRGFFGCRHFSKTNELLQKSGKKPIDWKEL

SEQ ID NO: 308 - protein, 150 aa, Artificial sequence
  Synthetic polypeptide
  MISC_FEATURE (6)..(150): May be absent
GGGGSGGGGSGGGGSGGGGSGGGGSGGGGSGGGGSGGGGSGGGGSGGGGSGGGGSGGGGSGGGGSGGGGSGGGGSGGGGSGGGGSGGGGSGGGGSGGGGSGGGGSGGGGSGGGGSGGGGSGGGGSGGGGSGGGGSGGGGSGGGGSGGGGS

SEQ ID NO: 309 - protein, 150 aa, Artificial sequence
  Synthetic polypeptide
  MISC_FEATURE (6)..(150): May be absent
EAAAKEAAAKEAAAKEAAAKEAAAKEAAAKEAAAKEAAAKEAAAKEAAAKEAAAKEAAAKEAAAKEAAAKEAAAKEAAAKEAAAKEAAAKEAAAKEAAAKEAAAKEAAAKEAAAKEAAAKEAAAKEAAAKEAAAKEAAAKEAAAKEAAAK

SEQ ID NO: 310 - protein, 16 aa, Artificial sequence
  Synthetic polypeptide
SGSETPGTSESATPES

SEQ ID NO: 311 - protein, 15 aa, Artificial Sequence
  Synthetic polypeptide
VPFLLEPDNINGKTC

SEQ ID NO: 312 - protein, 12 aa, Artificial Sequence
  Synthetic polypeptide
GSAGSAAGSGEF

SEQ ID NO: 313 - protein, 12 aa, Artificial Sequence
  Synthetic polypeptide
SIVAQLSRPDPA

SEQ ID NO: 314 - protein, 10 aa, Artificial Sequence
  Synthetic polypeptide
MKIIEQLPSA

SEQ ID NO: 315 - protein, 10 aa, Artificial Sequence
  Synthetic polypeptide
VRHKLKRVGS

SEQ ID NO: 316 - protein, 12 aa, Artificial Sequence
  Synthetic polypeptide
GHGTGSTGSGSS

SEQ ID NO: 317 - protein, 7 aa, Artificial Sequence
  Synthetic polypeptide
MSRPDPA

SEQ ID NO: 318 - protein, 12 aa, Artificial Sequence
  Synthetic polypeptide
SGSETPGTSESA

SEQ ID NO: 319 - protein, 21 aa, Artificial Sequence
  Synthetic polypeptide
SGSETPGTSESATPEGGSGGS

SEQ ID NO: 320 - protein, 4 aa, Artificial Sequence
  Synthetic polypeptide
GGSM

SEQ ID NO: 321 - protein, 1612 aa, Artificial Sequence
  Synthetic polypeptide
MSSETGPVAVDPTLRRRIEPHEFEVFFDPRELRKETCLLYEINWGGRHSIWRHTSQNTNKHVEVNFIEKFTTERYFCPNTRCSITWFLSWSPCGECSRAITEFLSRYPHVTLFIYIARLYHHADPRNRQGLRDLISSGVTIQIMTEQESGYCWRNFVNYSPSNEAHWPRYPHLWVRLYVLELYCIILGLPPCLNILRRKQPQLTFFTIALQSCHYQRLPPHILWATGLKSGSETPGTSESATPESDKKYSIGLAIGTNSVGWAVITDEYKVPSKKFKVLGNTDRHSIKKNLIGALLFDSGETAEATRLKRTARRRYTRRKNRICYLQEIFSNEMAKVDDSFFHRLEESFLVEEDKKHERHPIFGNIVDEVAYHEKYPTIYHLRKKLVDSTDKADLRLIYLALAHMIKFRGHFLIEGDLNPDNSDVDKLFIQLVQTYNQLFEENPINASGVDAKAILSARLSKSRRLENLIAQLPGEKKNGLFGNLIALSLGLTPNFKSNFDLAEDAKLQLSKDTYDDDLDNLLAQIGDQYADLFLAAKNLSDAILLSDILRVNTEITKAPLSASMIKRYDEHHQDLTLLKALVRQQLPEKYKEIFFDQSKNGYAGYIDGGASQEEFYKFIKPILEKMDGTEELLVKLNREDLLRKQRTFDNGSIPHQIHLGELHAILRRQEDFYPFLKDNREKIEKILTFRIPYYVGPLARGNSRFAWMTRKSEETITPWNFEEVVDKGASAQSFIERMTAFDKNLPNEKVLPKHSLLYEYFTVYNELTKVKYVTEGMRKPAFLSGEQKKAIVDLLFKTNRKVTVKQLKEDYFKKIECFDSVEISGVEDRFNASLGTYHDLLKIIKDKDFLDNEENEDILEDIVLTLTLFEDREMIEERLKTYAHLFDDKVMKQLKRRRYTGWGALSRKLINGIRDKQSGKTILDFLKSDGFANRNFMALIHDDSLTFKEDIQKAQVSGQGDSLHEHIANLAGSPAIKKGILQTVKVVDELVKVMGRHKPENIVIEMARENQTTQKGQKNSRERMKRIEEGIKELGSQILKEHPVENTQLQNEKLYLYYLQNGRDMYVDQELDINRLSDYDVDHIVPQSFLKDDSIDNKVLTRSDKNRGKSDNVPSEEVVKKMKNYWRQLLNAKLITQRKFDNLTKAERGGLSELDKAGFIKRQLVETRAITKHVAQILDSRMNTKYDENDKLIREVKVITLKSKLVSDFRKDFQFYKVREINNYHHAHDAYLNAVVGTALIKKYPKLESEFVYGDYKVYDVRKMIAKSEQEIGKATAKYFFYSNIMNFFKTEITLANGEIRKRPLIETNGETGEIVWDKGRDFATVRKVLSMPQVNIVKKTEVQTGGFSKESILPKRNSDKLIARKKDWDPKKYGGFDSPTVAYSVLVVAKVEKGKSKKLKSVKELLGITIMERSSFEKNPIDFLEAKGYKEVKKDLIIKLPKYSLFELENGRKRMLASAGELQKGNELALPSKYVNFLYLASHYEKLKGSPEDNEQKQLFVEQHKHYLDEIIEQISEFSKRVILADANLDKVLSAYNKHRDKPIREQAENIIHLFTLTNLGAPAAFKYFDTTIDRKRYTSTKEVLDATLIHQSITGLYETRIDLSQLGGD

SEQ ID NO: 322 - RNA, 93 nt, S. pyogenes
guuuaagagcuaugcuggaaagccacggugaaaaaguucaacuauugccugaucggaauaaauuugaacgauacgacagucggugcuuuuuuu

SEQ ID NO: 323 - RNA, 82 nt, S. pyogenes
guuuaagagcuagaaauagcaaguuuaaauaaggcuaguccguuaucaacuugaaaaaguggcaccgagucggugcuuuuuu

SEQ ID NO: 324 - RNA, 97 nt, S. thermophilus
guuuuuguacucucaagauucaauaaucuugcagaagcuacaaagauaaggcuucaugccgaaaucaacacccugucauuuuauggcaggguguuuu

SEQ ID NO: 325 - RNA, 97 nt, S. thermophilus
guuuuagagcuguguuguuuguuaaaacaacacagcgaguuaaaauaaggcuuaguccguacucaacuugaaaagguggcaccgauucgguguuuuu

SEQ ID NO: 326 - RNA, 74 nt, C. jejuni
aagaaauuuaaaaagggacuaaaauaaagaguuugcgggacucugcgggguuacaauccccuaaaaccgcuuuu

SEQ ID NO: 327 - RNA, 95 nt, F. novicida
aucuaaaauuauaaauguaccaaauaauuaaugcucuguaaucauuuaaaaguauuuugaacggaccucuguuugacacgucugaauaacuaaaa

SEQ ID NO: 328 - RNA, 109 nt, S. thermophilus2
uguaagggacgccuuacacaguuacuuaaaucuugcagaagcuacaaagauaaggcuucaugccgaaaucaacacccugucauuuuauggcaggguguuuucguuauuu

SEQ ID NO: 329 - RNA, 110 nt, M. mobile
uguauuucgaaauacagauguacaguuaagaauacauaagaaugauacaucacuaaaaaaaggcuuuaugccguaacuacuacuuauuuucaaaauaaguaguuuuuuuu

SEQ ID NO: 330 - RNA, 92 nt, L. innocua
auuguuaguauucaaaauaacauagcaaguuaaaauaaggcuuuguccguuaucaacuuuuaauuaaguagcgcuguuucggcgcuuuuuuu

SEQ ID NO: 331 - RNA, 89 nt, S. pyogenes
guuggaaccauucaaaacagcauagcaaguuaaaauaaggcuaguccguuaucaacuugaaaaaguggcaccgagucggugcuuuuuuu

SEQ ID NO: 332 - RNA, 107 nt, S. mutans
guuggaaucauucgaaacaacacagcaaguuaaaauaaggcagugauuuuuaauccaguccguacacaacuugaaaaagugcgcaccgauucggugcuuuuuuauuu

SEQ ID NO: 333 - RNA, 96 nt, S. thermophilus
uugugguuugaaaccauucgaaacaacacagcgaguuaaaauaaggcuuaguccguacucaacuugaaaagguggcaccgauucgguguuuuuuuu

SEQ ID NO: 334 - RNA, 102 nt, N. meningitidis
acauauugucgcacugcgaaaugagaaccguugcuacaauaaggccgucugaaaagaugugccgcaacgcucugccccuuaaagcuucugcuuuaaggggca

SEQ ID NO: 335 - RNA, 110 nt, P. multocida
gcauauuguugcacugcgaaaugagagacguugcuacaauaaggcuucugaaaagaaugaccguaacgcucugccccuugugauucuuaauugcaaggggcaucguuuuu

SEQ ID NO: 336 - protein, 345 aa, Sulfolobus islandicus
MEVPLYNIFGDNYIIQVATEAENSTIYNNKVEIDDEELRNVLNLAYKIAKNNEDAAAERRGKAKKKKGEEGETTTSNIILPLSGNDKNPWTETLKCYNFPTTVALSEVFKNFSQVKECEEVSAPSFVKPEFYKFGRSPGMVERTRRVKLEVEPHYLIMAAAGWVLTRLGKAKVSEGDYVGVNVFTPTRGILYSLIQNVNGIVPGIKPETAFGLWIARKVVSSVTNPNVSVVSIYTISDAVGQNPTTINGGFSIDLTKLLEKRDLLSERLEAIARNALSISSNMRERYIVLANYIYEYLTGSKRLEDLLYFANRDLIMNLNSDDGKVRDLKLISAYVNGELIRGEG

SEQ ID NO: 337 - protein, 345 aa, Sulfolobus islandicus
MEVPLYNIFGDNYIIQVATEAENSTIYNNKVEIDDEELRNVLNLAYKIAKNNEDAAAERRGKAKKKKGEEGETTTSNIILPLSGNDKNPWTETLKCYNFPTTVALSEVFKNFSQVKECEEVSAPSFVKPEFYEFGRSPGMVERTRRVKLEVEPHYLIIAAAGWVLTRLGKAKVSEGDYVGVNVFTPTRGILYSLIQNVNGIVPGIKPETAFGLWIARKVVSSVTNPNVSVVRIYTISDAVGQNPTTINGGFSIDLTKLLEKRYLLSERLEAIARNALSISSNMRERYIVLANYIYEYLTGSKRLEDLLYFANRDLIMNLNSDDGKVRDLKLISAYVNGELIRGEG

SEQ ID NO: 338 - RNA, 82 nt, Artificial Sequence
  Synthetic polynucleotide
guuuuagagcuagaaauagcaaguuaaaauaaaggcuaguccguuaucaacuugaaaaaguggcaccgagucggugcuuuuu

SEQ ID NO: 339 - RNA, 20 nt, Artificial Sequence
  Synthetic polynucleotide
gauggcaauguugccucccc

SEQ ID NO: 340 - RNA, 20 nt, Artificial Sequence
  Synthetic polynucleotide
auggcaauguugccuccccc

SEQ ID NO: 341 - RNA, 20 nt, Artificial Sequence
  Synthetic polynucleotide
uggcaauguugccuccccca

SEQ ID NO: 342 - RNA, 20 nt, Artificial Sequence
  Synthetic polynucleotide
uguugccucccccaggaccu

SEQ ID NO: 343 - RNA, 20 nt, Artificial Sequence
  Synthetic polynucleotide
guugccucccccaggaccuc

SEQ ID NO: 344 - RNA, 20 nt, Artificial Sequence
  Synthetic polynucleotide
uugccucccccaggaccuca

SEQ ID NO: 345 - RNA, 20 nt, Artificial Sequence
  Synthetic polynucleotide
aaaaucaaaggaacccaaag

SEQ ID NO: 346 - RNA, 20 nt, Artificial Sequence
  Synthetic polynucleotide
aaaucaaaggaacccaaaga

SEQ ID NO: 347 - RNA, 20 nt, Artificial Sequence
  Synthetic polynucleotide
caaaggaacccaaagaagaa

SEQ ID NO: 348 - RNA, 20 nt, Artificial Sequence
  Synthetic polynucleotide
aaaggaacccaaagaagaaa

SEQ ID NO: 349 - RNA, 20 nt, Artificial Sequence
  Synthetic polynucleotide
ggaacccaaagaagaaaaga

SEQ ID NO: 350 - RNA, 20 nt, Artificial Sequence
  Synthetic polynucleotide
gaacccaaagaagaaaagaa

SEQ ID NO: 351 - RNA, 20 nt, Artificial Sequence
  Synthetic polynucleotide
cccaaagaagaaaagaaaga

SEQ ID NO: 352 - RNA, 20 nt, Artificial Sequence
  Synthetic polynucleotide
aggaacccaaagaagaaaag

SEQ ID NO: 353 - RNA, 20 nt, Artificial Sequence
  Synthetic polynucleotide
aacccaaagaagaaaagaaa

SEQ ID NO: 354 - RNA, 20 nt, Artificial Sequence
  Synthetic polynucleotide
gaaaaucaaaggaacccaaa

SEQ ID NO: 355 - RNA, 20 nt, Artificial Sequence
  Synthetic polynucleotide
ucaaaggaacccaaagaaga

SEQ ID NO: 356 - RNA, 20 nt, Artificial Sequence
  Synthetic polynucleotide
gaugaagaagccccaaagcc

SEQ ID NO: 357 - RNA, 20 nt, Artificial Sequence
  Synthetic polynucleotide
gaagaagccccaaagccaag

SEQ ID NO: 358 - RNA, 20 nt, Artificial Sequence
  Synthetic polynucleotide
aagaagccccaaagccaagc

SEQ ID NO: 359 - RNA, 20 nt, Artificial Sequence
  Synthetic polynucleotide
gaagccccaaagccaagcag

SEQ ID NO: 360 - RNA, 20 nt, Artificial Sequence
  Synthetic polynucleotide
cccaaagccaagcagugacu

SEQ ID NO: 361 - RNA, 20 nt, Artificial Sequence
  Synthetic polynucleotide
ccaaagccaagcagugacuu

SEQ ID NO: 362 - RNA, 20 nt, Artificial Sequence
  Synthetic polynucleotide
augaagaagccccaaagcca

SEQ ID NO: 363 - RNA, 20 nt, Artificial Sequence
  Synthetic polynucleotide
aaagccaagcagugacuugg

SEQ ID NO: 364 - RNA, 20 nt, Artificial Sequence
  Synthetic polynucleotide
ccaagcagugacuuggaagc

SEQ ID NO: 365 - RNA, 20 nt, Artificial Sequence
  Synthetic polynucleotide
aaacagcugcccuucaucua

SEQ ID NO: 366 - RNA, 20 nt, Artificial Sequence
  Synthetic polynucleotide
aacagcugcccuucaucuau

SEQ ID NO: 367 - RNA, 20 nt, Artificial Sequence
  Synthetic polynucleotide
acagcugcccuucaucuaug

SEQ ID NO: 368 - RNA, 20 nt, Artificial Sequence
  Synthetic polynucleotide
cagcugcccuucaucuaugg

SEQ ID NO: 369 - RNA, 20 nt, Artificial Sequence
  Synthetic polynucleotide
aaacagcugcccuucaucua

SEQ ID NO: 370 - RNA, 20 nt, Artificial Sequence
  Synthetic polynucleotide
uggggacauuccucccggca

SEQ ID NO: 371 - RNA, 20 nt, Artificial Sequence
  Synthetic polynucleotide
ggggacauuccucccggcau

SEQ ID NO: 372 - RNA, 20 nt, Artificial Sequence
  Synthetic polynucleotide
cauuccucccggcauggugu

SEQ ID NO: 373 - RNA, 20 nt, Artificial Sequence
  Synthetic polynucleotide
auuccucccggcaugguguc

SEQ ID NO: 374 - RNA, 20 nt, Artificial Sequence
  Synthetic polynucleotide
uuccucccggcaugguguca

SEQ ID NO: 375 - RNA, 20 nt, Artificial Sequence
  Synthetic polynucleotide
uauggggacauuccucccgg

SEQ ID NO: 376 - RNA, 20 nt, Artificial Sequence
  Synthetic polynucleotide
uggggacauuccucccggca

SEQ ID NO: 377 - RNA, 20 nt, Artificial Sequence
  Synthetic polynucleotide
cauggugucagagccccugg

SEQ ID NO: 378 - RNA, 20 nt, Artificial Sequence
  Synthetic polynucleotide
auggugucagagccccugga

SEQ ID NO: 379 - RNA, 20 nt, Artificial Sequence
  Synthetic polynucleotide
gucagagccccuggaggacu

SEQ ID NO: 380 - RNA, 20 nt, Artificial Sequence
  Synthetic polynucleotide
ucagagccccuggaggacuu

SEQ ID NO: 381 - RNA, 20 nt, Artificial Sequence
  Synthetic polynucleotide
ggacuuggaccccuacuaug

SEQ ID NO: 382 - RNA, 20 nt, Artificial Sequence
  Synthetic polynucleotide
gacuuggaccccuacuaugc

SEQ ID NO: 383 - RNA, 20 nt, Artificial Sequence
  Synthetic polynucleotide
accccuacuaugcagacaaa

SEQ ID NO: 384 - protein, 24 aa, Artificial Sequence
  Synthetic polypeptide
SGGSSGSETPGTSESATPESSGGS

SEQ ID NO: 385 - protein, 32 aa, Artificial Sequence
  Synthetic polypeptide
SGGSSGGSSGSETPGTSESATPESSGGSSGGS

SEQ ID NO: 386 - protein, 104 aa, Artificial Sequence
  Synthetic polypeptide
GGSGGSPGSPAGSPTSTEEGTSESATPESGPGTSTEPSEGSAPGSPAGSPTSTEEGTSTEPSEGSAPGTSTEPSEGSAPGTSESATPESGPGSEPATSGGSGGS

SEQ ID NO: 387 - RNA, 20 nt, Artificial Sequence
  Synthetic polynucleotide
ccccuacuaugcagacaaaa

SEQ ID NO: 388 - RNA, 20 nt, Artificial Sequence
  Synthetic polynucleotide
cccuacuaugcagacaaaaa

SEQ ID NO: 389 - RNA, 20 nt, Artificial Sequence
  Synthetic polynucleotide
gaccccuacuaugcagacaa

SEQ ID NO: 390 - RNA, 20 nt, Artificial Sequence
  Synthetic polynucleotide
ccccuacuaugcagacaaaa

SEQ ID NO: 391 - RNA, 20 nt, Artificial Sequence
  Synthetic polynucleotide
cuuucuccuuucaguccucu

SEQ ID NO: 392 - RNA, 20 nt, Artificial Sequence
  Synthetic polynucleotide
uuucuccuuucaguccucua

SEQ ID NO: 393 - RNA, 20 nt, Artificial Sequence
  Synthetic polynucleotide
ucuccuuucaguccucuaag

SEQ ID NO: 394 - RNA, 20 nt, Artificial Sequence
  Synthetic polynucleotide
cuccuuucaguccucuaaga

SEQ ID NO: 395 - RNA, 20 nt, Artificial Sequence
  Synthetic polynucleotide
ucuccuuucaguccucuaag

SEQ ID NO: 396 - RNA, 20 nt, Artificial Sequence
  Synthetic polynucleotide
gcuuucuccuuucaguccuc

SEQ ID NO: 397 - RNA, 20 nt, Artificial Sequence
  Synthetic polynucleotide
uucuccuuucaguccucuaa

SEQ ID NO: 398 - RNA, 20 nt, Artificial Sequence
  Synthetic polynucleotide
ccucuaagaagaauaucuau

SEQ ID NO: 399 - RNA, 20 nt, Artificial Sequence
  Synthetic polynucleotide
agugcacaugaugagcaugc

SEQ ID NO: 400 - RNA, 20 nt, Artificial Sequence
  Synthetic polynucleotide
gucagaauagugcacaugau

SEQ ID NO: 401 - RNA, 20 nt, Artificial Sequence
  Synthetic polynucleotide
cacaugaugagcaugcugaa

SEQ ID NO: 402 - RNA, 20 nt, Artificial Sequence
  Synthetic polynucleotide
uagugcacaugaugagcaug

SEQ ID NO: 403 - RNA, 20 nt, Artificial Sequence
  Synthetic polynucleotide
aauaugcaguuugucagaau

SEQ ID NO: 404 - RNA, 20 nt, Artificial Sequence
  Synthetic polynucleotide
aaauaugcaguuugucagaa

SEQ ID NO: 405 - RNA, 20 nt, Artificial Sequence
  Synthetic polynucleotide
ucauaaauaugcaguuuguc

SEQ ID NO: 406 - RNA, 20 nt, Artificial Sequence
  Synthetic polynucleotide
gucauaaauaugcaguuugu

SEQ ID NO: 407 - RNA, 20 nt, Artificial Sequence
  Synthetic polynucleotide
caguuugucagaauagugca

SEQ ID NO: 408 - RNA, 20 nt, Artificial Sequence
  Synthetic polynucleotide
auaaauaugcaguuugucag

SEQ ID NO: 409 - RNA, 20 nt, Artificial Sequence
  Synthetic polynucleotide
gucauaaauaugcaguuugu

SEQ ID NO: 410 - RNA, 20 nt, Artificial Sequence
  Synthetic polynucleotide
ggucauaaauaugcaguuug

SEQ ID NO: 411 - RNA, 20 nt, Artificial Sequence
  Synthetic polynucleotide
ccaugaauaacccaccggac

SEQ ID NO: 412 - RNA, 20 nt, Artificial Sequence
  Synthetic polynucleotide
caugaauaacccaccggacu

SEQ ID NO: 413 - RNA, 20 nt, Artificial Sequence
  Synthetic polynucleotide
auaacccaccggacuggacc

SEQ ID NO: 414 - RNA, 20 nt, Artificial Sequence
  Synthetic polynucleotide
accggacuggaccaaaaaug

SEQ ID NO: 415 - RNA, 20 nt, Artificial Sequence
  Synthetic polynucleotide
aaaguauauauuccaguaaa

SEQ ID NO: 416 - RNA, 20 nt, Artificial Sequence
  Synthetic polynucleotide
ucaaaaguauauauuccagu

SEQ ID NO: 417 - RNA, 20 nt, Artificial Sequence
  Synthetic polynucleotide
cuacacagaagccucuugca

SEQ ID NO: 418 - RNA, 20 nt, Artificial Sequence
  Synthetic polynucleotide
ccuacacagaagccucuugc

SEQ ID NO: 419 - RNA, 20 nt, Artificial Sequence
  Synthetic polynucleotide
aagugaauucuccuacacag

SEQ ID NO: 420 - RNA, 20 nt, Artificial Sequence
  Synthetic polynucleotide
aaaagugaauucuccuacac

SEQ ID NO: 421 - RNA, 20 nt, Artificial Sequence
  Synthetic polynucleotide
ccuacacagaagccucuugc

SEQ ID NO: 422 - RNA, 20 nt, Artificial Sequence
  Synthetic polynucleotide
agaaaagugaauucuccuac

SEQ ID NO: 423 - RNA, 20 nt, Artificial Sequence
  Synthetic polynucleotide
uucuucgugacccguggaac

SEQ ID NO: 424 - RNA, 20 nt, Artificial Sequence
  Synthetic polynucleotide
ucgugacccguggaacuggc

SEQ ID NO: 425 - RNA, 20 nt, Artificial Sequence
  Synthetic polynucleotide
cgugacccguggaacuggcu

SEQ ID NO: 426 - RNA, 20 nt, Artificial Sequence
  Synthetic polynucleotide
uucgugacccguggaacugg

SEQ ID NO: 427 - RNA, 20 nt, Artificial Sequence
  Synthetic polynucleotide
uuucuguaaucccagguaag

SEQ ID NO: 428 - RNA, 20 nt, Artificial Sequence
  Synthetic polynucleotide
aaucccagguaagaaguaau

SEQ ID NO: 429 - RNA, 20 nt, Artificial Sequence
  Synthetic polynucleotide
aucccagguaagaaguaauu

SEQ ID NO: 430 - RNA, 20 nt, Artificial Sequence
  Synthetic polynucleotide
cccagguaagaaguaauugg

SEQ ID NO: 431 - RNA, 20 nt, Artificial Sequence
  Synthetic polynucleotide
uauuucuguaaucccaggua

SEQ ID NO: 432 - RNA, 20 nt, Artificial Sequence
  Synthetic polynucleotide
uucuguaaucccagguaaga

SEQ ID NO: 433 - RNA, 20 nt, Artificial Sequence
  Synthetic polynucleotide
guaaucccagguaagaagua

SEQ ID NO: 434 - RNA, 20 nt, Artificial Sequence
  Synthetic polynucleotide
aaucccagguaagaaguaau

SEQ ID NO: 435 - RNA, 20 nt, Artificial Sequence
  Synthetic polynucleotide
ccuacaauugucuucaggcc

SEQ ID NO: 436 - RNA, 20 nt, Artificial Sequence
  Synthetic polynucleotide
aagccccuacaauugucuuc

SEQ ID NO: 437 - RNA, 20 nt, Artificial Sequence
  Synthetic polynucleotide
aaagccccuacaauugucuu

SEQ ID NO: 438 - RNA, 20 nt, Artificial Sequence
  Synthetic polynucleotide
cuacaauugucuucaggccu

SEQ ID NO: 439 - RNA, 20 nt, Artificial Sequence
  Synthetic polynucleotide
acagaacacagucaggauca

SEQ ID NO: 440 - RNA, 20 nt, Artificial Sequence
  Synthetic polynucleotide
acucagacagaacacaguca

SEQ ID NO: 441 - RNA, 20 nt, Artificial Sequence
  Synthetic polynucleotide
cacucagacagaacacaguc

SEQ ID NO: 442 - RNA, 20 nt, Artificial Sequence
  Synthetic polynucleotide
acacucagacagaacacagu

SEQ ID NO: 443 - RNA, 20 nt, Artificial Sequence
  Synthetic polynucleotide
acacucagacagaacacagu

SEQ ID NO: 444 - RNA, 20 nt, Artificial Sequence
  Synthetic polynucleotide
caauuagugcaaacacacuc

SEQ ID NO: 445 - RNA, 20 nt, Artificial Sequence
  Synthetic polynucleotide
ccaauuagugcaaacacacu

SEQ ID NO: 446 - RNA, 20 nt, Artificial Sequence
  Synthetic polynucleotide
uucgaaaacauuuaugcuuc

SEQ ID NO: 447 - RNA, 20 nt, Artificial Sequence
  Synthetic polynucleotide
uuucgaaaacauuuaugcuu

SEQ ID NO: 448 - RNA, 20 nt, Artificial Sequence
  Synthetic polynucleotide
auuucgaaaacauuuaugcu

SEQ ID NO: 449 - RNA, 20 nt, Artificial Sequence
  Synthetic polynucleotide
ccacaaaggagagcaucuuu

SEQ ID NO: 450 - RNA, 20 nt, Artificial Sequence
  Synthetic polynucleotide
accacaaaggagagcaucuu

SEQ ID NO: 451 - RNA, 20 nt, Artificial Sequence
  Synthetic polynucleotide
ugugcugaaaccacaaagga

SEQ ID NO: 452 - RNA, 20 nt, Artificial Sequence
  Synthetic polynucleotide
aaccacaaaggagagcaucu

SEQ ID NO: 453 - RNA, 20 nt, Artificial Sequence
  Synthetic polynucleotide
acacugacuacacacgagaa

SEQ ID NO: 454 - RNA, 20 nt, Artificial Sequence
  Synthetic polynucleotide
gacacugacuacacacgaga

SEQ ID NO: 455 - RNA, 20 nt, Artificial Sequence
  Synthetic polynucleotide
cuggacacugacuacacacg

SEQ ID NO: 456 - RNA, 20 nt, Artificial Sequence
  Synthetic polynucleotide
ucuggacacugacuacacac

SEQ ID NO: 457 - RNA, 20 nt, Artificial Sequence
  Synthetic polynucleotide
ggacacugacuacacacgag

SEQ ID NO: 458 - RNA, 20 nt, Artificial Sequence
  Synthetic polynucleotide
cucuggacacugacuacaca

SEQ ID NO: 459 - RNA, 20 nt, Artificial Sequence
  Synthetic polynucleotide
cucuggacacugacuacaca

SEQ ID NO: 460 - RNA, 20 nt, Artificial Sequence
  Synthetic polynucleotide
aguguccagagggguacacc

SEQ ID NO: 461 - RNA, 20 nt, Artificial Sequence
  Synthetic polynucleotide
uguccagagggguacaccug

SEQ ID NO: 462 - RNA, 20 nt, Artificial Sequence
  Synthetic polynucleotide
uccagagggguacaccugug

SEQ ID NO: 463 - RNA, 20 nt, Artificial Sequence
  Synthetic polynucleotide
ccagagggguacaccugugu

SEQ ID NO: 464 - RNA, 20 nt, Artificial Sequence
  Synthetic polynucleotide
agguguaccccucuggacac

SEQ ID NO: 465 - RNA, 20 nt, Artificial Sequence
  Synthetic polynucleotide
ucacacagguguaccccucu

SEQ ID NO: 466 - RNA, 20 nt, Artificial Sequence
  Synthetic polynucleotide
uucacacagguguaccccuc

SEQ ID NO: 467 - RNA, 20 nt, Artificial Sequence
  Synthetic polynucleotide
auuggcagaaacccugauua

SEQ ID NO: 468 - RNA, 20 nt, Artificial Sequence
  Synthetic polynucleotide
aaacccugauuauggcuaca

SEQ ID NO: 469 - RNA, 20 nt, Artificial Sequence
  Synthetic polynucleotide
aacccugauuauggcuacac

SEQ ID NO: 470 - RNA, 20 nt, Artificial Sequence
  Synthetic polynucleotide
uacccccaaucagguaccac

SEQ ID NO: 471 - RNA, 20 nt, Artificial Sequence
  Synthetic polynucleotide
ugcagucaccacucagcauu

SEQ ID NO: 472 - RNA, 20 nt, Artificial Sequence
  Synthetic polynucleotide
cagucaccacucagcauucg

SEQ ID NO: 473 - RNA, 20 nt, Artificial Sequence
  Synthetic polynucleotide
gcucacuguuugugccccac

SEQ ID NO: 474 - RNA, 20 nt, Artificial Sequence
  Synthetic polynucleotide
uguuugugccccacagaccc

SEQ ID NO: 475 - RNA, 20 nt, Artificial Sequence
  Synthetic polynucleotide
guuugugccccacagacccc

SEQ ID NO: 476 - RNA, 20 nt, Artificial Sequence
  Synthetic polynucleotide
uuugugccccacagacccca

SEQ ID NO: 477 - RNA, 20 nt, Artificial Sequence
  Synthetic polynucleotide
uugugccccacagaccccag

SEQ ID NO: 478 - RNA, 20 nt, Artificial Sequence
  Synthetic polynucleotide
ugugccccacagaccccagg

SEQ ID NO: 479 - RNA, 20 nt, Artificial Sequence
  Synthetic polynucleotide
ugccccacagaccccaggag

SEQ ID NO: 480 - RNA, 20 nt, Artificial Sequence
  Synthetic polynucleotide
guuugugccccacagacccc

SEQ ID NO: 481 - RNA, 20 nt, Artificial Sequence
  Synthetic polynucleotide
cacagaccccaggagcgacg

SEQ ID NO: 482 - RNA, 20 nt, Artificial Sequence
  Synthetic polynucleotide
agaccccaggagcgacgcag

SEQ ID NO: 483 - RNA, 20 nt, Artificial Sequence
  Synthetic polynucleotide
acagaccccaggagcgacgc

SEQ ID NO: 484 - RNA, 20 nt, Artificial Sequence
  Synthetic polynucleotide
uagguccccaccaaugcugc

SEQ ID NO: 485 - RNA, 20 nt, Artificial Sequence
  Synthetic polynucleotide
agguccccaccaaugcugcc

SEQ ID NO: 486 - RNA, 20 nt, Artificial Sequence
  Synthetic polynucleotide
guccccaccaaugcugccgg

SEQ ID NO: 487 - RNA, 20 nt, Artificial Sequence
  Synthetic polynucleotide
ccaccaaugcugccggugaa

SEQ ID NO: 488 - RNA, 20 nt, Artificial Sequence
  Synthetic polynucleotide
aguagguccccaccaaugcu

SEQ ID NO: 489 - RNA, 20 nt, Artificial Sequence
  Synthetic polynucleotide
uagguccccaccaaugcugc

SEQ ID NO: 490 - RNA, 20 nt, Artificial Sequence
  Synthetic polynucleotide
caccaaugcugccggugaac

SEQ ID NO: 491 - RNA, 20 nt, Artificial Sequence
  Synthetic polynucleotide
accaaugcugccggugaacg

SEQ ID NO: 492 - RNA, 20 nt, Artificial Sequence
  Synthetic polynucleotide
caccaaugcugccggugaac

SEQ ID NO: 493 - RNA, 20 nt, Artificial Sequence
  Synthetic polynucleotide
accaaugcugccggugaacg

SEQ ID NO: 494 - RNA, 20 nt, Artificial Sequence
  Synthetic polynucleotide
ccggugaacgggaaaaugca

SEQ ID NO: 495 - RNA, 20 nt, Artificial Sequence
  Synthetic polynucleotide
ccaaugcugccggugaacgg

SEQ ID NO: 496 - RNA, 20 nt, Artificial Sequence
  Synthetic polynucleotide
cccucaugcuccccaaugga

SEQ ID NO: 497 - RNA, 20 nt, Artificial Sequence
  Synthetic polynucleotide
ccccaauggacagcuucugc

SEQ ID NO: 498 - RNA, 20 nt, Artificial Sequence
  Synthetic polynucleotide
cccaauggacagcuucugcc

SEQ ID NO: 499 - RNA, 20 nt, Artificial Sequence
  Synthetic polynucleotide
cccaauggacagcuucugcc

SEQ ID NO: 500 - RNA, 20 nt, Artificial Sequence
  Synthetic polynucleotide
gcuucugccagaggugauaa

SEQ ID NO: 501 - RNA, 20 nt, Artificial Sequence
  Synthetic polynucleotide
cuucugccagaggugauaau

SEQ ID NO: 502 - RNA, 20 nt, Artificial Sequence
  Synthetic polynucleotide
ugccagaggugauaauagau

SEQ ID NO: 503 - RNA, 20 nt, Artificial Sequence
  Synthetic polynucleotide
gccagaggugauaauagaua

SEQ ID NO: 504 - RNA, 20 nt, Artificial Sequence
  Synthetic polynucleotide
ggacagcuucugccagaggu

SEQ ID NO: 505 - RNA, 20 nt, Artificial Sequence
  Synthetic polynucleotide
agcuucugccagaggugaua

SEQ ID NO: 506 - RNA, 20 nt, Artificial Sequence
  Synthetic polynucleotide
augcugaaugaucccaaccu

SEQ ID NO: 507 - RNA, 20 nt, Artificial Sequence
  Synthetic polynucleotide
ugcugaaugaucccaaccuc

SEQ ID NO: 508 - RNA, 20 nt, Artificial Sequence
  Synthetic polynucleotide
ugaaugaucccaaccucaga

SEQ ID NO: 509 - RNA, 20 nt, Artificial Sequence
  Synthetic polynucleotide
gaaugaucccaaccucagac

SEQ ID NO: 510 - RNA, 20 nt, Artificial Sequence
  Synthetic polynucleotide
aaugaucccaaccucagaca

SEQ ID NO: 511 - RNA, 20 nt, Artificial Sequence
  Synthetic polynucleotide
augaucccaaccucagacag

SEQ ID NO: 512 - RNA, 20 nt, Artificial Sequence
  Synthetic polynucleotide
ugaucccaaccucagacaga

SEQ ID NO: 513 - RNA, 20 nt, Artificial Sequence
  Synthetic polynucleotide
gaucccaaccucagacagag

SEQ ID NO: 514 - RNA, 20 nt, Artificial Sequence
  Synthetic polynucleotide
cagacaaaaauguccaccuu

SEQ ID NO: 515 - RNA, 20 nt, Artificial Sequence
  Synthetic polynucleotide
gacaaaaauguccaccuugg

SEQ ID NO: 516 - RNA, 20 nt, Artificial Sequence
  Synthetic polynucleotide
aaauguccaccuugguggua

SEQ ID NO: 517 - RNA, 20 nt, Artificial Sequence
  Synthetic polynucleotide
aauguccaccuuggugguac

SEQ ID NO: 518 - RNA, 20 nt, Artificial Sequence
  Synthetic polynucleotide
cagacaaaaauguccaccuu

SEQ ID NO: 519 - RNA, 20 nt, Artificial Sequence
  Synthetic polynucleotide
aaaauguccaccuugguggu

SEQ ID NO: 520 - RNA, 20 nt, Artificial Sequence
  Synthetic polynucleotide
ccagacaaaaauguccaccu

SEQ ID NO: 521 - RNA, 20 nt, Artificial Sequence
  Synthetic polynucleotide
gaauugcucuccauauugga

SEQ ID NO: 522 - RNA, 20 nt, Artificial Sequence
  Synthetic polynucleotide
uccauauuggauaaaauuca

SEQ ID NO: 523 - RNA, 20 nt, Artificial Sequence
  Synthetic polynucleotide
auuguaauggauccuuuugu

SEQ ID NO: 524 - RNA, 20 nt, Artificial Sequence
  Synthetic polynucleotide
uuauuguaauggauccuuuu

SEQ ID NO: 525 - RNA, 20 nt, Artificial Sequence
  Synthetic polynucleotide
auggauccuuuuguagaucu

SEQ ID NO: 526 - RNA, 20 nt, Artificial Sequence
  Synthetic polynucleotide
cuaugcaaaugguaauugca

SEQ ID NO: 527 - RNA, 20 nt, Artificial Sequence
  Synthetic polynucleotide
acuaugcaaaugguaauugc

SEQ ID NO: 528 - RNA, 20 nt, Artificial Sequence
  Synthetic polynucleotide
aacuaugcaaaugguaauug

SEQ ID NO: 529 - RNA, 20 nt, Artificial Sequence
  Synthetic polynucleotide
auggaacaccacccaaugac

SEQ ID NO: 530 - RNA, 20 nt, Artificial Sequence
  Synthetic polynucleotide
uggaacaccacccaaugacu

SEQ ID NO: 531 - RNA, 20 nt, Artificial Sequence
  Synthetic polynucleotide
ggaacaccacccaaugacug

SEQ ID NO: 532 - RNA, 20 nt, Artificial Sequence
  Synthetic polynucleotide
gaacaccacccaaugacuga

SEQ ID NO: 533 - RNA, 20 nt, Artificial Sequence
  Synthetic polynucleotide
ggaacaccacccaaugacug

SEQ ID NO: 534 - RNA, 20 nt, Artificial Sequence
  Synthetic polynucleotide
acccaaugacugaggaauuc

SEQ ID NO: 535 - RNA, 20 nt, Artificial Sequence
  Synthetic polynucleotide
uccuauagcaaguacauuuu

SEQ ID NO: 536 - RNA, 20 nt, Artificial Sequence
  Synthetic polynucleotide
cuuaccaaauuuccuauagc

SEQ ID NO: 537 - RNA, 20 nt, Artificial Sequence
  Synthetic polynucleotide
uuccuauagcaaguacauuu

SEQ ID NO: 538 - RNA, 20 nt, Artificial Sequence
  Synthetic polynucleotide
gacuuaccaaauuuccuaua

SEQ ID NO: 539 - RNA, 20 nt, Artificial Sequence
  Synthetic polynucleotide
uuccaguaaagaccuaagug

SEQ ID NO: 540 - RNA, 20 nt, Artificial Sequence
  Synthetic polynucleotide
auuccaguaaagaccuaagu

SEQ ID NO: 541 - RNA, 20 nt, Artificial Sequence
  Synthetic polynucleotide
aagauuccaguaaagaccua

SEQ ID NO: 542 - RNA, 20 nt, Artificial Sequence
  Synthetic polynucleotide
aaagauuccaguaaagaccu

SEQ ID NO: 543 - RNA, 20 nt, Artificial Sequence
  Synthetic polynucleotide
agcugcaaagauuccaguaa

SEQ ID NO: 544 - RNA, 20 nt, Artificial Sequence
  Synthetic polynucleotide
ccaguaaagaccuaagugag

SEQ ID NO: 545 - RNA, 20 nt, Artificial Sequence
  Synthetic polynucleotide
gcaaagauuccaguaaagac

SEQ ID NO: 546 - RNA, 20 nt, Artificial Sequence
  Synthetic polynucleotide
gauuccaguaaagaccuaag

SEQ ID NO: 547 - RNA, 20 nt, Artificial Sequence
  Synthetic polynucleotide
gauuccaguaaagaccuaag

SEQ ID NO: 548 - RNA, 20 nt, Artificial Sequence
  Synthetic polynucleotide
ggauccauaugaguauuucc

SEQ ID NO: 549 - RNA, 20 nt, Artificial Sequence
  Synthetic polynucleotide
uccauaugaguauuuccaag

SEQ ID NO: 550 - RNA, 20 nt, Artificial Sequence
  Synthetic polynucleotide
ccauaugaguauuuccaagu

SEQ ID NO: 551 - RNA, 20 nt, Artificial Sequence
  Synthetic polynucleotide
auggauccauaugaguauuu

SEQ ID NO: 552 - RNA, 20 nt, Artificial Sequence
  Synthetic polynucleotide
ccuuccacaucugcuagaaa

SEQ ID NO: 553 - RNA, 20 nt, Artificial Sequence
  Synthetic polynucleotide
auccuuccacaucugcuaga

SEQ ID NO: 554 - RNA, 20 nt, Artificial Sequence
  Synthetic polynucleotide
acaauccuuccacaucugcu

SEQ ID NO: 555 - RNA, 20 nt, Artificial Sequence
  Synthetic polynucleotide
gacaauccuuccacaucugc

SEQ ID NO: 556 - RNA, 20 nt, Artificial Sequence
  Synthetic polynucleotide
ugacaauccuuccacaucug

SEQ ID NO: 557 - RNA, 20 nt, Artificial Sequence
  Synthetic polynucleotide
uccuuccacaucugcuagaa

SEQ ID NO: 558 - RNA, 20 nt, Artificial Sequence
  Synthetic polynucleotide
cuggccaacauugaacaugc

SEQ ID NO: 559 - RNA, 20 nt, Artificial Sequence
  Synthetic polynucleotide
uccuggccaacauugaacau

SEQ ID NO: 560 - RNA, 20 nt, Artificial Sequence
  Synthetic polynucleotide
ccaacauugaacaugcugau

SEQ ID NO: 561 - RNA, 20 nt, Artificial Sequence
  Synthetic polynucleotide
auucuuuguagcucuuacca

SEQ ID NO: 562 - RNA, 20 nt, Artificial Sequence
  Synthetic polynucleotide
ucuugcagacacauucuuug

SEQ ID NO: 563 - RNA, 20 nt, Artificial Sequence
  Synthetic polynucleotide
ucuugcagacacauucuuug

SEQ ID NO: 564 - RNA, 20 nt, Artificial Sequence
  Synthetic polynucleotide
acagucaucauugaucuugc

SEQ ID NO: 565 - RNA, 20 nt, Artificial Sequence
  Synthetic polynucleotide
uacagucaucauugaucuug

SEQ ID NO: 566 - RNA, 20 nt, Artificial Sequence
  Synthetic polynucleotide
ugggagcguacagucaucau

SEQ ID NO: 567 - RNA, 20 nt, Artificial Sequence
  Synthetic polynucleotide
uacgcucccacgguggcaca

SEQ ID NO: 568 - RNA, 20 nt, Artificial Sequence
  Synthetic polynucleotide
cucccacgguggcacaugaa

SEQ ID NO: 569 - RNA, 20 nt, Artificial Sequence
  Synthetic polynucleotide
acagcacgcggaacacaauc

SEQ ID NO: 570 - RNA, 20 nt, Artificial Sequence
  Synthetic polynucleotide
cacagcacgcggaacacaau

SEQ ID NO: 571 - RNA, 20 nt, Artificial Sequence
  Synthetic polynucleotide
ccacucuccacacagcacgc

SEQ ID NO: 572 - RNA, 20 nt, Artificial Sequence
  Synthetic polynucleotide
uccacucuccacacagcacg

SEQ ID NO: 573 - RNA, 20 nt, Artificial Sequence
  Synthetic polynucleotide
uauccacucuccacacagca

SEQ ID NO: 574 - RNA, 20 nt, Artificial Sequence
  Synthetic polynucleotide
ucuccacacagcacgcggaa

SEQ ID NO: 575 - RNA, 20 nt, Artificial Sequence
  Synthetic polynucleotide
gaccuccauacagucccaca

SEQ ID NO: 576 - RNA, 20 nt, Artificial Sequence
  Synthetic polynucleotide
gcgaccuccauacaguccca

SEQ ID NO: 577 - RNA, 20 nt, Artificial Sequence
  Synthetic polynucleotide
aaggcacauagcuugaccag

SEQ ID NO: 578 - RNA, 20 nt, Artificial Sequence
  Synthetic polynucleotide
auaaggcacauagcuugacc

SEQ ID NO: 579 - RNA, 20 nt, Artificial Sequence
  Synthetic polynucleotide
aauaaggcacauagcuugac

SEQ ID NO: 580 - RNA, 20 nt, Artificial Sequence
  Synthetic polynucleotide
aaacaauaaggcacauagcu

SEQ ID NO: 581 - RNA, 20 nt, Artificial Sequence
  Synthetic polynucleotide
caccagguuuccaaugacca

SEQ ID NO: 582 - RNA, 20 nt, Artificial Sequence
  Synthetic polynucleotide
acccugaugcaaacaaccuc

SEQ ID NO: 583 - RNA, 20 nt, Artificial Sequence
  Synthetic polynucleotide
cccugaugcaaacaaccucc

SEQ ID NO: 584 - RNA, 20 nt, Artificial Sequence
  Synthetic polynucleotide
gacccugaugcaaacaaccu

SEQ ID NO: 585 - RNA, 20 nt, Artificial Sequence
  Synthetic polynucleotide
uccaaaaagccaaagauuuc

SEQ ID NO: 586 - RNA, 20 nt, Artificial Sequence
  Synthetic polynucleotide
ccaaaaagccaaagauuucc

SEQ ID NO: 587 - RNA, 20 nt, Artificial Sequence
  Synthetic polynucleotide
caaaaagccaaagauuucca

SEQ ID NO: 588 - RNA, 20 nt, Artificial Sequence
  Synthetic polynucleotide
aaaaagccaaagauuuccag

SEQ ID NO: 589 - RNA, 20 nt, Artificial Sequence
  Synthetic polynucleotide
aaaagccaaagauuuccagg

SEQ ID NO: 590 - RNA, 20 nt, Artificial Sequence
  Synthetic polynucleotide
aaagccaaagauuuccaggg

SEQ ID NO: 591 - RNA, 20 nt, Artificial Sequence
  Synthetic polynucleotide
ccaaagauuuccagggagau

SEQ ID NO: 592 - RNA, 20 nt, Artificial Sequence
  Synthetic polynucleotide
aaaaagccaaagauuuccag

SEQ ID NO: 593 - RNA, 20 nt, Artificial Sequence
  Synthetic polynucleotide
caaaaagccaaagauuucca

SEQ ID NO: 594 - RNA, 20 nt, Artificial Sequence
  Synthetic polynucleotide
uauucacaaucccagccuca

SEQ ID NO: 595 - RNA, 20 nt, Artificial Sequence
  Synthetic polynucleotide
auucacaaucccagccucac

SEQ ID NO: 596 - RNA, 20 nt, Artificial Sequence
  Synthetic polynucleotide
ucacaaucccagccucacag

SEQ ID NO: 597 - RNA, 20 nt, Artificial Sequence
  Synthetic polynucleotide
caaucccagccucacaguga

SEQ ID NO: 598 - RNA, 20 nt, Artificial Sequence
  Synthetic polynucleotide
aaucccagccucacagugac

SEQ ID NO: 599 - RNA, 20 nt, Artificial Sequence
  Synthetic polynucleotide
uuuauucacaaucccagccu

SEQ ID NO: 600 - RNA, 20 nt, Artificial Sequence
  Synthetic polynucleotide
cacaaucccagccucacagu

SEQ ID NO: 601 - RNA, 20 nt, Artificial Sequence
  Synthetic polynucleotide
cccagccucacagugacagu

SEQ ID NO: 602 - RNA, 20 nt, Artificial Sequence
  Synthetic polynucleotide
gugacagugccaauugcacc

SEQ ID NO: 603 - RNA, 20 nt, Artificial Sequence
  Synthetic polynucleotide
ugacagugccaauugcaccu

SEQ ID NO: 604 - RNA, 20 nt, Artificial Sequence
  Synthetic polynucleotide
gacagugccaauugcaccug

SEQ ID NO: 605 - RNA, 20 nt, Artificial Sequence
  Synthetic polynucleotide
acagugccaauugcaccugg

SEQ ID NO: 606 - RNA, 20 nt, Artificial Sequence
  Synthetic polynucleotide
ccaauugcaccuggggaauc

SEQ ID NO: 607 - RNA, 20 nt, Artificial Sequence
  Synthetic polynucleotide
gacagugccaauugcaccug

SEQ ID NO: 608 - RNA, 20 nt, Artificial Sequence
  Synthetic polynucleotide
ugccaauugcaccuggggaa

SEQ ID NO: 609 - RNA, 20 nt, Artificial Sequence
  Synthetic polynucleotide
gugacagugccaauugcacc

SEQ ID NO: 610 - RNA, 20 nt, Artificial Sequence
  Synthetic polynucleotide
ugcaccuggggaauccgauu

SEQ ID NO: 611 - RNA, 20 nt, Artificial Sequence
  Synthetic polynucleotide
gcaccuggggaauccgauuu

SEQ ID NO: 612 - RNA, 20 nt, Artificial Sequence
  Synthetic polynucleotide
caccuggggaauccgauuug

SEQ ID NO: 613 - RNA, 20 nt, Artificial Sequence
  Synthetic polynucleotide
acaguugauaacccuuugcc

SEQ ID NO: 614 - RNA, 20 nt, Artificial Sequence
  Synthetic polynucleotide
caguugauaacccuuugccu

SEQ ID NO: 615 - RNA, 20 nt, Artificial Sequence
  Synthetic polynucleotide
aguugauaacccuuugccug

SEQ ID NO: 616 - RNA, 20 nt, Artificial Sequence
  Synthetic polynucleotide
guugauaacccuuugccugg

SEQ ID NO: 617 - RNA, 20 nt, Artificial Sequence
  Synthetic polynucleotide
ugauaacccuuugccuggag

SEQ ID NO: 618 - RNA, 20 nt, Artificial Sequence
  Synthetic polynucleotide
gauaacccuuugccuggaga

SEQ ID NO: 619 - RNA, 20 nt, Artificial Sequence
  Synthetic polynucleotide
auaacccuuugccuggagaa

SEQ ID NO: 620 - RNA, 20 nt, Artificial Sequence
  Synthetic polynucleotide
uaacccuuugccuggagaag

SEQ ID NO: 621 - RNA, 20 nt, Artificial Sequence
  Synthetic polynucleotide
aacccuuugccuggagaagg

SEQ ID NO: 622 - RNA, 20 nt, Artificial Sequence
  Synthetic polynucleotide
cccuuugccuggagaaggag

SEQ ID NO: 623 - RNA, 20 nt, Artificial Sequence
  Synthetic polynucleotide
ccuuugccuggagaaggaga

SEQ ID NO: 624 - RNA, 20 nt, Artificial Sequence
  Synthetic polynucleotide
acaguugauaacccuuugcc

SEQ ID NO: 625 - RNA, 20 nt, Artificial Sequence
  Synthetic polynucleotide
caguugauaacccuuugccu

SEQ ID NO: 626 - RNA, 20 nt, Artificial Sequence
  Synthetic polynucleotide
gauaacccuuugccuggaga

SEQ ID NO: 627 - RNA, 20 nt, Artificial Sequence
  Synthetic polynucleotide
auaacccuuugccuggagaa

SEQ ID NO: 628 - RNA, 20 nt, Artificial Sequence
  Synthetic polynucleotide
acccuuugccuggagaagga

SEQ ID NO: 629 - RNA, 20 nt, Artificial Sequence
  Synthetic polynucleotide
uuugccuggagaaggagaag

SEQ ID NO: 630 - RNA, 20 nt, Artificial Sequence
  Synthetic polynucleotide
gccuggagaaggagaagaag

SEQ ID NO: 631 - RNA, 20 nt, Artificial Sequence
  Synthetic polynucleotide
ccuggagaaggagaagaagc

SEQ ID NO: 632 - RNA, 20 nt, Artificial Sequence
  Synthetic polynucleotide
gaggcugaaccuaugaauuc

SEQ ID NO: 633 - RNA, 20 nt, Artificial Sequence
  Synthetic polynucleotide
gcugaaccuaugaauuccga

SEQ ID NO: 634 - RNA, 20 nt, Artificial Sequence
  Synthetic polynucleotide
cugaaccuaugaauuccgau

SEQ ID NO: 635 - RNA, 20 nt, Artificial Sequence
  Synthetic polynucleotide
accuaugaauuccgaugagc

SEQ ID NO: 636 - RNA, 20 nt, Artificial Sequence
  Synthetic polynucleotide
ccuaugaauuccgaugagcc

SEQ ID NO: 637 - RNA, 20 nt, Artificial Sequence
  Synthetic polynucleotide
cagaggcugaaccuaugaau

SEQ ID NO: 638 - RNA, 20 nt, Artificial Sequence
  Synthetic polynucleotide
ugagccagaggccuguuuca

SEQ ID NO: 639 - RNA, 20 nt, Artificial Sequence
  Synthetic polynucleotide
gagccagaggccuguuucac

SEQ ID NO: 640 - RNA, 20 nt, Artificial Sequence
  Synthetic polynucleotide
ccagaggccuguuucacaga

SEQ ID NO: 641 - RNA, 20 nt, Artificial Sequence
  Synthetic polynucleotide
augagccagaggccuguuuc

SEQ ID NO: 642 - RNA, 20 nt, Artificial Sequence
  Synthetic polynucleotide
agccagaggccuguuucaca

SEQ ID NO: 643 - RNA, 20 nt, Artificial Sequence
  Synthetic polynucleotide
aaacaggccucuggcucauc

SEQ ID NO: 644 - RNA, 20 nt, Artificial Sequence
  Synthetic polynucleotide
gaaacaggccucuggcucau

SEQ ID NO: 645 - RNA, 20 nt, Artificial Sequence
  Synthetic polynucleotide
ccaucugugaaacaggccuc

SEQ ID NO: 646 - RNA, 20 nt, Artificial Sequence
  Synthetic polynucleotide
gaaacaggccucuggcucau

SEQ ID NO: 647 - RNA, 20 nt, Artificial Sequence
  Synthetic polynucleotide
cauacacaaccugacaagaa

SEQ ID NO: 648 - RNA, 20 nt, Artificial Sequence
  Synthetic polynucleotide
ccauacacaaccugacaaga

SEQ ID NO: 649 - RNA, 20 nt, Artificial Sequence
  Synthetic polynucleotide
ccuccauacacaaccugaca

SEQ ID NO: 650 - RNA, 20 nt, Artificial Sequence
  Synthetic polynucleotide
accuccauacacaaccugac

SEQ ID NO: 651 - RNA, 20 nt, Artificial Sequence
  Synthetic polynucleotide
aaccuccauacacaaccuga

SEQ ID NO: 652 - RNA, 20 nt, Artificial Sequence
  Synthetic polynucleotide
uuggccccauuaaaucccuu

SEQ ID NO: 653 - RNA, 20 nt, Artificial Sequence
  Synthetic polynucleotide
uggccccauuaaaucccuuc

SEQ ID NO: 654 - RNA, 20 nt, Artificial Sequence
  Synthetic polynucleotide
agaccucuaagagccuuauc

SEQ ID NO: 655 - RNA, 20 nt, Artificial Sequence
  Synthetic polynucleotide
gaccucuaagagccuuaucu

SEQ ID NO: 656 - RNA, 20 nt, Artificial Sequence
  Synthetic polynucleotide
aagaccucuaagagccuuau

SEQ ID NO: 657 - RNA, 20 nt, Artificial Sequence
  Synthetic polynucleotide
aggagcaauuccuuccauca

SEQ ID NO: 658 - RNA, 20 nt, Artificial Sequence
  Synthetic polynucleotide
gcaauuccuuccaucaugaa

SEQ ID NO: 659 - RNA, 20 nt, Artificial Sequence
  Synthetic polynucleotide
uaggagcaauuccuuccauc

SEQ ID NO: 660 - RNA, 20 nt, Artificial Sequence
  Synthetic polynucleotide
acacacaaguagcacauuca

SEQ ID NO: 661 - RNA, 20 nt, Artificial Sequence
  Synthetic polynucleotide
agacacacaaguagcacauu

SEQ ID NO: 662 - RNA, 20 nt, Artificial Sequence
  Synthetic polynucleotide
ccaugaugcugaauaucagc

SEQ ID NO: 663 - RNA, 20 nt, Artificial Sequence
  Synthetic polynucleotide
acucccaugaugcugaauau

SEQ ID NO: 664 - RNA, 20 nt, Artificial Sequence
  Synthetic polynucleotide
caaauuuacucccaugaugc

SEQ ID NO: 665 - RNA, 20 nt, Artificial Sequence
  Synthetic polynucleotide
ccaugaugcugaauaucagc

SEQ ID NO: 666 - RNA, 20 nt, Artificial Sequence
  Synthetic polynucleotide
acaaauuuacucccaugaug

SEQ ID NO: 667 - RNA, 20 nt, Artificial Sequence
  Synthetic polynucleotide
cccaugaugcugaauaucag

SEQ ID NO: 668 - RNA, 20 nt, Artificial Sequence
  Synthetic polynucleotide
aauacacucauagaacuugc

SEQ ID NO: 669 - RNA, 20 nt, Artificial Sequence
  Synthetic polynucleotide
gucacgguuuccugcaaguc

SEQ ID NO: 670 - RNA, 20 nt, Artificial Sequence
  Synthetic polynucleotide
gggucacgguuuccugcaag

SEQ ID NO: 671 - RNA, 20 nt, Artificial Sequence
  Synthetic polynucleotide
gguuuccugcaagucaaguu

SEQ ID NO: 672 - RNA, 20 nt, Artificial Sequence
  Synthetic polynucleotide
agucaaguuccaaaucguuc

SEQ ID NO: 673 - RNA, 20 nt, Artificial Sequence
  Synthetic polynucleotide
aagucaaguuccaaaucguu

SEQ ID NO: 674 - RNA, 20 nt, Artificial Sequence
  Synthetic polynucleotide
auucggaacgauuuggaacu

SEQ ID NO: 675 - RNA, 20 nt, Artificial Sequence
  Synthetic polynucleotide
caaaacauucggaacgauuu

SEQ ID NO: 676 - RNA, 20 nt, Artificial Sequence
  Synthetic polynucleotide
gcaaaacauucggaacgauu

SEQ ID NO: 677 - RNA, 20 nt, Artificial Sequence
  Synthetic polynucleotide
uaagggcaaaacauucggaa

SEQ ID NO: 678 - RNA, 20 nt, Artificial Sequence
  Synthetic polynucleotide
cauaagggcaaaacauucgg

SEQ ID NO: 679 - RNA, 20 nt, Artificial Sequence
  Synthetic polynucleotide
guagacaagcagcccaaaua

SEQ ID NO: 680 - RNA, 20 nt, Artificial Sequence
  Synthetic polynucleotide
aagcagcccaaauaugaaua

SEQ ID NO: 681 - RNA, 20 nt, Artificial Sequence
  Synthetic polynucleotide
ugacccaaagaugauaaaga

SEQ ID NO: 682 - RNA, 20 nt, Artificial Sequence
  Synthetic polynucleotide
gaaugacccaaagaugauaa

SEQ ID NO: 683 - RNA, 20 nt, Artificial Sequence
  Synthetic polynucleotide
agaaugacccaaagaugaua

SEQ ID NO: 684 - RNA, 20 nt, Artificial Sequence
  Synthetic polynucleotide
agugaagaaugacccaaaga

SEQ ID NO: 685 - RNA, 20 nt, Artificial Sequence
  Synthetic polynucleotide
cccaaagaugauaaagacga

SEQ ID NO: 686 - RNA, 20 nt, Artificial Sequence
  Synthetic polynucleotide
ugggguccaagaagccacaa

SEQ ID NO: 687 - RNA, 20 nt, Artificial Sequence
  Synthetic polynucleotide
ggguccaagaagccacaaaa

SEQ ID NO: 688 - RNA, 20 nt, Artificial Sequence
  Synthetic polynucleotide
agccacaaaagccaauuccu

SEQ ID NO: 689 - RNA, 20 nt, Artificial Sequence
  Synthetic polynucleotide
ggguccaagaagccacaaaa

SEQ ID NO: 690 - RNA, 20 nt, Artificial Sequence
  Synthetic polynucleotide
acaaaagccaauuccucgac

SEQ ID NO: 691 - RNA, 20 nt, Artificial Sequence
  Synthetic polynucleotide
caaaagccaauuccucgacc

SEQ ID NO: 692 - RNA, 20 nt, Artificial Sequence
  Synthetic polynucleotide
aaaagccaauuccucgacca

SEQ ID NO: 693 - RNA, 20 nt, Artificial Sequence
  Synthetic polynucleotide
aaagccaauuccucgaccag

SEQ ID NO: 694 - RNA, 20 nt, Artificial Sequence
  Synthetic polynucleotide
aaagccaauuccucgaccag

SEQ ID NO: 695 - RNA, 20 nt, Artificial Sequence
  Synthetic polynucleotide
caaaagccaauuccucgacc

SEQ ID NO: 696 - RNA, 20 nt, Artificial Sequence
  Synthetic polynucleotide
caaaagccaauuccucgacc

SEQ ID NO: 697 - RNA, 20 nt, Artificial Sequence
  Synthetic polynucleotide
aauuccucgaccagggguaa

SEQ ID NO: 698 - RNA, 20 nt, Artificial Sequence
  Synthetic polynucleotide
aauuccucgaccagggguaa

SEQ ID NO: 699 - RNA, 20 nt, Artificial Sequence
  Synthetic polynucleotide
guugagacagauaagaacca

SEQ ID NO: 700 - RNA, 20 nt, Artificial Sequence
  Synthetic polynucleotide
uuaccauguugagacagaua

SEQ ID NO: 701 - RNA, 20 nt, Artificial Sequence
  Synthetic polynucleotide
guuaccauguugagacagau

SEQ ID NO: 702 - RNA, 20 nt, Artificial Sequence
  Synthetic polynucleotide
agacagauaagaaccaugau

SEQ ID NO: 703 - RNA, 20 nt, Artificial Sequence
  Synthetic polynucleotide
auguugagacagauaagaac

SEQ ID NO: 704 - RNA, 20 nt, Artificial Sequence
  Synthetic polynucleotide
gguuaccauguugagacaga

SEQ ID NO: 705 - RNA, 20 nt, Artificial Sequence
  Synthetic polynucleotide
cacacauucuccagugaaaa

SEQ ID NO: 706 - RNA, 20 nt, Artificial Sequence
  Synthetic polynucleotide
gcacacauucuccagugaaa

SEQ ID NO: 707 - RNA, 20 nt, Artificial Sequence
  Synthetic polynucleotide
agcacacauucuccagugaa

SEQ ID NO: 708 - RNA, 20 nt, Artificial Sequence
  Synthetic polynucleotide
agcacacauucuccagugaa

SEQ ID NO: 709 - RNA, 20 nt, Artificial Sequence
  Synthetic polynucleotide
cacacauucuccagugaaaa

SEQ ID NO: 710 - RNA, 20 nt, Artificial Sequence
  Synthetic polynucleotide
gcacacauucuccagugaaa

SEQ ID NO: 711 - RNA, 20 nt, Artificial Sequence
  Synthetic polynucleotide
agcacacauucuccagugaa

SEQ ID NO: 712 - RNA, 20 nt, Artificial Sequence
  Synthetic polynucleotide
uuuuagcacacauucuccag

SEQ ID NO: 713 - RNA, 20 nt, Artificial Sequence
  Synthetic polynucleotide
aguuuuagcacacauucucc

SEQ ID NO: 714 - RNA, 20 nt, Artificial Sequence
  Synthetic polynucleotide
caguuuuagcacacauucuc

SEQ ID NO: 715 - RNA, 20 nt, Artificial Sequence
  Synthetic polynucleotide
agcacacauucuccagugaa

SEQ ID NO: 716 - RNA, 20 nt, Artificial Sequence
  Synthetic polynucleotide
aucaguuuuagcacacauuc

SEQ ID NO: 717 - RNA, 20 nt, Artificial Sequence
  Synthetic polynucleotide
ccauccuacagugaaguagu

SEQ ID NO: 718 - RNA, 20 nt, Artificial Sequence
  Synthetic polynucleotide
uccauccuacagugaaguag

SEQ ID NO: 719 - RNA, 20 nt, Artificial Sequence
  Synthetic polynucleotide
uauuccauccuacagugaag

SEQ ID NO: 720 - RNA, 20 nt, Artificial Sequence
  Synthetic polynucleotide
aaauauuccauccuacagug

SEQ ID NO: 721 - RNA, 20 nt, Artificial Sequence
  Synthetic polynucleotide
aaaaauauuccauccuacag

SEQ ID NO: 722 - RNA, 20 nt, Artificial Sequence
  Synthetic polynucleotide
auuccauccuacagugaagu

SEQ ID NO: 723 - RNA, 20 nt, Artificial Sequence
  Synthetic polynucleotide
aauauuccauccuacaguga

SEQ ID NO: 724 - RNA, 20 nt, Artificial Sequence
  Synthetic polynucleotide
aaaaauauuccauccuacag

SEQ ID NO: 725 - RNA, 20 nt, Artificial Sequence
  Synthetic polynucleotide
uuguguccccuacccuguuc

SEQ ID NO: 726 - RNA, 20 nt, Artificial Sequence
  Synthetic polynucleotide
uguguccccuacccuguucc

SEQ ID NO: 727 - RNA, 20 nt, Artificial Sequence
  Synthetic polynucleotide
guguccccuacccuguuccg

SEQ ID NO: 728 - RNA, 20 nt, Artificial Sequence
  Synthetic polynucleotide
guccccuacccuguuccgag

SEQ ID NO: 729 - RNA, 20 nt, Artificial Sequence
  Synthetic polynucleotide
uuuguguccccuacccuguu

SEQ ID NO: 730 - RNA, 20 nt, Artificial Sequence
  Synthetic polynucleotide
guguccccuacccuguuccg

SEQ ID NO: 731 - RNA, 20 nt, Artificial Sequence
  Synthetic polynucleotide
cuuugacuagacguaggauu

SEQ ID NO: 732 - RNA, 20 nt, Artificial Sequence
  Synthetic polynucleotide
ugcuccuuugacuagacgua

SEQ ID NO: 733 - RNA, 20 nt, Artificial Sequence
  Synthetic polynucleotide
uugcuccuuugacuagacgu

SEQ ID NO: 734 - RNA, 20 nt, Artificial Sequence
  Synthetic polynucleotide
uuugcuccuuugacuagacg

SEQ ID NO: 735 - RNA, 20 nt, Artificial Sequence
  Synthetic polynucleotide
uccccuuugcuccuuugacu

SEQ ID NO: 736 - RNA, 20 nt, Artificial Sequence
  Synthetic polynucleotide
auccccuuugcuccuuugac

SEQ ID NO: 737 - RNA, 20 nt, Artificial Sequence
  Synthetic polynucleotide
uuugcuccuuugacuagacg

SEQ ID NO: 738 - RNA, 20 nt, Artificial Sequence
  Synthetic polynucleotide
uccccuuugcuccuuugacu

SEQ ID NO: 739 - RNA, 20 nt, Artificial Sequence
  Synthetic polynucleotide
auccccuuugcuccuuugac

SEQ ID NO: 740 - RNA, 20 nt, Artificial Sequence
  Synthetic polynucleotide
gcggauccccuuugcuccuu

SEQ ID NO: 741 - RNA, 20 nt, Artificial Sequence
  Synthetic polynucleotide
cuuccugcguuguuuaacau

SEQ ID NO: 742 - RNA, 20 nt, Artificial Sequence
  Synthetic polynucleotide
cauuccaaagauggcguaga

SEQ ID NO: 743 - RNA, 20 nt, Artificial Sequence
  Synthetic polynucleotide
ggacauuccaaagauggcgu

SEQ ID NO: 744 - RNA, 20 nt, Artificial Sequence
  Synthetic polynucleotide
uggacauuccaaagauggcg

SEQ ID NO: 745 - RNA, 20 nt, Artificial Sequence
  Synthetic polynucleotide
aaguuggacauuccaaagau

SEQ ID NO: 746 - RNA, 20 nt, Artificial Sequence
  Synthetic polynucleotide
uuggacauuccaaagauggc

SEQ ID NO: 747 - RNA, 20 nt, Artificial Sequence
  Synthetic polynucleotide
aaaguuggacauuccaaaga

SEQ ID NO: 748 - RNA, 20 nt, Artificial Sequence
  Synthetic polynucleotide
gcaaaucauacuguugccaa

SEQ ID NO: 749 - RNA, 20 nt, Artificial Sequence
  Synthetic polynucleotide
ggcaaaucauacuguugcca

SEQ ID NO: 750 - RNA, 20 nt, Artificial Sequence
  Synthetic polynucleotide
aggcaaaucauacuguugcc

SEQ ID NO: 751 - RNA, 20 nt, Artificial Sequence
  Synthetic polynucleotide
uugcuagcaccuauucuuaa

SEQ ID NO: 752 - RNA, 20 nt, Artificial Sequence
  Synthetic polynucleotide
uagcaccuauucuuaacagu

SEQ ID NO: 753 - RNA, 20 nt, Artificial Sequence
  Synthetic polynucleotide
gauugcuagcaccuauucuu

SEQ ID NO: 754 - RNA, 20 nt, Artificial Sequence
  Synthetic polynucleotide
uuaacaguaagccacccgac

SEQ ID NO: 755 - RNA, 20 nt, Artificial Sequence
  Synthetic polynucleotide
aacaguaagccacccgacug

SEQ ID NO: 756 - RNA, 20 nt, Artificial Sequence
  Synthetic polynucleotide
ccacccgacugugacccaaa

SEQ ID NO: 757 - RNA, 20 nt, Artificial Sequence
  Synthetic polynucleotide
acccgacugugacccaaaaa

SEQ ID NO: 758 - RNA, 20 nt, Artificial Sequence
  Synthetic polynucleotide
agucggguggcuuacuguua

SEQ ID NO: 759 - RNA, 20 nt, Artificial Sequence
  Synthetic polynucleotide
cagucggguggcuuacuguu

SEQ ID NO: 760 - RNA, 20 nt, Artificial Sequence
  Synthetic polynucleotide
uuuuuugggucacagucggg

SEQ ID NO: 761 - RNA, 20 nt, Artificial Sequence
  Synthetic polynucleotide
cuuuuuuugggucacagucg

SEQ ID NO: 762 - RNA, 20 nt, Artificial Sequence
  Synthetic polynucleotide
acuuuuuuugggucacaguc

SEQ ID NO: 763 - RNA, 20 nt, Artificial Sequence
  Synthetic polynucleotide
cagucggguggcuuacuguu

SEQ ID NO: 764 - RNA, 20 nt, Artificial Sequence
  Synthetic polynucleotide
gaacuuuuuuugggucacag

SEQ ID NO: 765 - RNA, 20 nt, Artificial Sequence
  Synthetic polynucleotide
acagucggguggcuuacugu

SEQ ID NO: 766 - RNA, 20 nt, Artificial Sequence
  Synthetic polynucleotide
acuuuuuuugggucacaguc

SEQ ID NO: 767 - RNA, 20 nt, Artificial Sequence
  Synthetic polynucleotide
gacccaaaaaaaguucaucc

SEQ ID NO: 768 - RNA, 20 nt, Artificial Sequence
  Synthetic polynucleotide
acccaaaaaaaguucauccu

SEQ ID NO: 769 - RNA, 20 nt, Artificial Sequence
  Synthetic polynucleotide
ccaaaaaaaguucauccugg

SEQ ID NO: 770 - RNA, 20 nt, Artificial Sequence
  Synthetic polynucleotide
acccaaaaaaaguucauccu

SEQ ID NO: 771 - RNA, 20 nt, Artificial Sequence
  Synthetic polynucleotide
aaaaguucauccuggaaguu

SEQ ID NO: 772 - RNA, 20 nt, Artificial Sequence
  Synthetic polynucleotide
guucauccuggaaguucagu

SEQ ID NO: 773 - RNA, 20 nt, Artificial Sequence
  Synthetic polynucleotide
ucauccuggaaguucaguug

SEQ ID NO: 774 - RNA, 20 nt, Artificial Sequence
  Synthetic polynucleotide
cauccuggaaguucaguuga

SEQ ID NO: 775 - RNA, 20 nt, Artificial Sequence
  Synthetic polynucleotide
auccuggaaguucaguugaa

SEQ ID NO: 776 - RNA, 20 nt, Artificial Sequence
  Synthetic polynucleotide
uccuggaaguucaguugaag

SEQ ID NO: 777 - RNA, 20 nt, Artificial Sequence
  Synthetic polynucleotide
ccuggaaguucaguugaagg

SEQ ID NO: 778 - RNA, 20 nt, Artificial Sequence
  Synthetic polynucleotide
aaaaaaguucauccuggaag

SEQ ID NO: 779 - RNA, 20 nt, Artificial Sequence
  Synthetic polynucleotide
cauccuggaaguucaguuga

SEQ ID NO: 780 - RNA, 20 nt, Artificial Sequence
  Synthetic polynucleotide
uuaccacagucuccuucaac

SEQ ID NO: 781 - RNA, 20 nt, Artificial Sequence
  Synthetic polynucleotide
gacugugguaacccaucugu

SEQ ID NO: 782 - RNA, 20 nt, Artificial Sequence
  Synthetic polynucleotide
acugugguaacccaucuguu

SEQ ID NO: 783 - RNA, 20 nt, Artificial Sequence
  Synthetic polynucleotide
gacugugguaacccaucugu

SEQ ID NO: 784 - RNA, 20 nt, Artificial Sequence
  Synthetic polynucleotide
uuccaacagauggguuacca

SEQ ID NO: 785 - RNA, 20 nt, Artificial Sequence
  Synthetic polynucleotide
aguagaauauuccaacagau

SEQ ID NO: 786 - RNA, 20 nt, Artificial Sequence
  Synthetic polynucleotide
aaguagaauauuccaacaga

SEQ ID NO: 787 - RNA, 20 nt, Artificial Sequence
  Synthetic polynucleotide
uauuccaacagauggguuac

SEQ ID NO: 788 - RNA, 20 nt, Artificial Sequence
  Synthetic polynucleotide
aaaguagaauauuccaacag

SEQ ID NO: 789 - RNA, 20 nt, Artificial Sequence
  Synthetic polynucleotide
gaaaguacugaaccucugag

SEQ ID NO: 790 - RNA, 20 nt, Artificial Sequence
  Synthetic polynucleotide
aaaguacugaaccucugagu

SEQ ID NO: 791 - RNA, 20 nt, Artificial Sequence
  Synthetic polynucleotide
aaguacugaaccucugagug

SEQ ID NO: 792 - RNA, 20 nt, Artificial Sequence
  Synthetic polynucleotide
aguacugaaccucugaguga

SEQ ID NO: 793 - RNA, 20 nt, Artificial Sequence
  Synthetic polynucleotide
acugaaccucugagugagga

SEQ ID NO: 794 - RNA, 20 nt, Artificial Sequence
  Synthetic polynucleotide
ccucugagugaggaugacuu

SEQ ID NO: 795 - RNA, 20 nt, Artificial Sequence
  Synthetic polynucleotide
aaaguacugaaccucugagu

SEQ ID NO: 796 - RNA, 20 nt, Artificial Sequence
  Synthetic polynucleotide
ccucugagugaggaugacuu

SEQ ID NO: 797 - RNA, 20 nt, Artificial Sequence
  Synthetic polynucleotide
aguuugaucccgaugcgacc

SEQ ID NO: 798 - RNA, 20 nt, Artificial Sequence
  Synthetic polynucleotide
ucccgaugcgacccaguuua

SEQ ID NO: 799 - RNA, 20 nt, Artificial Sequence
  Synthetic polynucleotide
cccgaugcgacccaguuuau

SEQ ID NO: 800 - RNA, 20 nt, Artificial Sequence
  Synthetic polynucleotide
gaaguuugaucccgaugcga

SEQ ID NO: 801 - RNA, 20 nt, Artificial Sequence
  Synthetic polynucleotide
ucccgaugcgacccaguuua

SEQ ID NO: 802 - RNA, 20 nt, Artificial Sequence
  Synthetic polynucleotide
ccuggauccuccucuucuca

SEQ ID NO: 803 - RNA, 20 nt, Artificial Sequence
  Synthetic polynucleotide
ucucauagcaaaacccaaca

SEQ ID NO: 804 - RNA, 20 nt, Artificial Sequence
  Synthetic polynucleotide
uagcaaaacccaacaaaguc

SEQ ID NO: 805 - RNA, 20 nt, Artificial Sequence
  Synthetic polynucleotide
cuucucauagcaaaacccaa

SEQ ID NO: 806 - RNA, 20 nt, Artificial Sequence
  Synthetic polynucleotide
gccauggaucugcccauggu

SEQ ID NO: 807 - RNA, 20 nt, Artificial Sequence
  Synthetic polynucleotide
ccauggaucugcccaugguu

SEQ ID NO: 808 - RNA, 20 nt, Artificial Sequence
  Synthetic polynucleotide
auggaucugcccaugguuag

SEQ ID NO: 809 - RNA, 20 nt, Artificial Sequence
  Synthetic polynucleotide
uggaucugcccaugguuagu

SEQ ID NO: 810 - RNA, 20 nt, Artificial Sequence
  Synthetic polynucleotide
gaucugcccaugguuagugg

SEQ ID NO: 811 - RNA, 20 nt, Artificial Sequence
  Synthetic polynucleotide
ugcccaugguuaguggugac

SEQ ID NO: 812 - RNA, 20 nt, Artificial Sequence
  Synthetic polynucleotide
gcccaugguuaguggugacc

SEQ ID NO: 813 - RNA, 20 nt, Artificial Sequence
  Synthetic polynucleotide
uugccauggaucugcccaug

SEQ ID NO: 814 - RNA, 20 nt, Artificial Sequence
  Synthetic polynucleotide
ccauggaucugcccaugguu

SEQ ID NO: 815 - RNA, 20 nt, Artificial Sequence
  Synthetic polynucleotide
cugcccaugguuagugguga

SEQ ID NO: 816 - RNA, 20 nt, Artificial Sequence
  Synthetic polynucleotide
auggaucugcccaugguuag

SEQ ID NO: 817 - RNA, 20 nt, Artificial Sequence
  Synthetic polynucleotide
augucugcaaauccuuccaa

SEQ ID NO: 818 - RNA, 20 nt, Artificial Sequence
  Synthetic polynucleotide
aauccuuccaaaguguccua

SEQ ID NO: 819 - RNA, 20 nt, Artificial Sequence
  Synthetic polynucleotide
uucaugucugcaaauccuuc

SEQ ID NO: 820 - RNA, 20 nt, Artificial Sequence
  Synthetic polynucleotide
gaacucaaguccagaaaaaa

SEQ ID NO: 821 - RNA, 20 nt, Artificial Sequence
  Synthetic polynucleotide
aacucaaguccagaaaaaac

SEQ ID NO: 822 - RNA, 20 nt, Artificial Sequence
  Synthetic polynucleotide
agaacucaaguccagaaaaa

SEQ ID NO: 823 - RNA, 20 nt, Artificial Sequence
  Synthetic polynucleotide
ccaccaccucuccaccuuca

SEQ ID NO: 824 - RNA, 20 nt, Artificial Sequence
  Synthetic polynucleotide
accaccucuccaccuucaua

SEQ ID NO: 825 - RNA, 20 nt, Artificial Sequence
  Synthetic polynucleotide
accucuccaccuucauauga

SEQ ID NO: 826 - RNA, 20 nt, Artificial Sequence
  Synthetic polynucleotide
ccucuccaccuucauaugau

SEQ ID NO: 827 - RNA, 20 nt, Artificial Sequence
  Synthetic polynucleotide
ccaccucuccaccuucauau

SEQ ID NO: 828 - RNA, 20 nt, Artificial Sequence
  Synthetic polynucleotide
aguguaacaaagccagacaa

SEQ ID NO: 829 - RNA, 20 nt, Artificial Sequence
  Synthetic polynucleotide
guguaacaaagccagacaaa

SEQ ID NO: 830 - RNA, 20 nt, Artificial Sequence
  Synthetic polynucleotide
uguaacaaagccagacaaag

SEQ ID NO: 831 - RNA, 20 nt, Artificial Sequence
  Synthetic polynucleotide
aagccagacaaagagaaaua

SEQ ID NO: 832 - RNA, 20 nt, Artificial Sequence
  Synthetic polynucleotide
uguaacaaagccagacaaag

SEQ ID NO: 833 - RNA, 20 nt, Artificial Sequence
  Synthetic polynucleotide
aguguaacaaagccagacaa

SEQ ID NO: 834 - RNA, 20 nt, Artificial Sequence
  Synthetic polynucleotide
aaacagucucuugcccucau

SEQ ID NO: 835 - RNA, 20 nt, Artificial Sequence
  Synthetic polynucleotide
cucauugaacaacgcauugc

SEQ ID NO: 836 - RNA, 20 nt, Artificial Sequence
  Synthetic polynucleotide
auugaacaacgcauugcuga

SEQ ID NO: 837 - RNA, 20 nt, Artificial Sequence
  Synthetic polynucleotide
uugaacaacgcauugcugaa

SEQ ID NO: 838 - RNA, 20 nt, Artificial Sequence
  Synthetic polynucleotide
ugaacaacgcauugcugaaa

SEQ ID NO: 839 - RNA, 20 nt, Artificial Sequence
  Synthetic polynucleotide
cauugaacaacgcauugcug

SEQ ID NO: 840 - RNA, 20 nt, Artificial Sequence
  Synthetic polynucleotide
aaacagcugcccuucaucua

SEQ ID NO: 841 - RNA, 20 nt, Artificial Sequence
  Synthetic polynucleotide
aacagcugcccuucaucuau

SEQ ID NO: 842 - RNA, 20 nt, Artificial Sequence
  Synthetic polynucleotide
acagcugcccuucaucuaug

SEQ ID NO: 843 - RNA, 20 nt, Artificial Sequence
  Synthetic polynucleotide
cagcugcccuucaucuaugg

SEQ ID NO: 844 - RNA, 20 nt, Artificial Sequence
  Synthetic polynucleotide
aaacagcugcccuucaucua

SEQ ID NO: 845 - RNA, 20 nt, Artificial Sequence
  Synthetic polynucleotide
ccaguccgguggguuauuca

SEQ ID NO: 846 - RNA, 20 nt, Artificial Sequence
  Synthetic polynucleotide
cauuuuugguccaguccggu

SEQ ID NO: 847 - RNA, 20 nt, Artificial Sequence
  Synthetic polynucleotide
acauuuuugguccaguccgg

SEQ ID NO: 848 - RNA, 20 nt, Artificial Sequence
  Synthetic polynucleotide
guccaguccgguggguuauu

SEQ ID NO: 849 - RNA, 20 nt, Artificial Sequence
  Synthetic polynucleotide
gacauuuuugguccaguccg

SEQ ID NO: 850 - RNA, 20 nt, Artificial Sequence
  Synthetic polynucleotide
ccacgggucacgaagaaaag

SEQ ID NO: 851 - RNA, 20 nt, Artificial Sequence
  Synthetic polynucleotide
uuccacgggucacgaagaaa

SEQ ID NO: 852 - RNA, 20 nt, Artificial Sequence
  Synthetic polynucleotide
guuccacgggucacgaagaa

SEQ ID NO: 853 - RNA, 20 nt, Artificial Sequence
  Synthetic polynucleotide
gccaguuccacgggucacga

SEQ ID NO: 854 - RNA, 20 nt, Artificial Sequence
  Synthetic polynucleotide
agccaguuccacgggucacg

SEQ ID NO: 855 - RNA, 20 nt, Artificial Sequence
  Synthetic polynucleotide
ccagccaguuccacggguca

SEQ ID NO: 856 - RNA, 20 nt, Artificial Sequence
  Synthetic polynucleotide
uccacgggucacgaagaaaa

SEQ ID NO: 857 - RNA, 20 nt, Artificial Sequence
  Synthetic polynucleotide
caguuccacgggucacgaag

SEQ ID NO: 858 - RNA, 20 nt, Artificial Sequence
  Synthetic polynucleotide
cagccaguuccacgggucac

SEQ ID NO: 859 - RNA, 20 nt, Artificial Sequence
  Synthetic polynucleotide
caaaauccagccaguuccac

SEQ ID NO: 860 - RNA, 20 nt, Artificial Sequence
  Synthetic polynucleotide
acaaaauccagccaguucca

SEQ ID NO: 861 - RNA, 20 nt, Artificial Sequence
  Synthetic polynucleotide
gacaaaauccagccaguucc

SEQ ID NO: 862 - RNA, 20 nt, Artificial Sequence
  Synthetic polynucleotide
guuucagcucuucgaacuuu

SEQ ID NO: 863 - RNA, 20 nt, Artificial Sequence
  Synthetic polynucleotide
uuucagcucuucgaacuuuc

SEQ ID NO: 864 - RNA, 20 nt, Artificial Sequence
  Synthetic polynucleotide
uucagcucuucgaacuuuca

SEQ ID NO: 865 - RNA, 20 nt, Artificial Sequence
  Synthetic polynucleotide
ucuucgaacuuucagaguau

SEQ ID NO: 866 - RNA, 20 nt, Artificial Sequence
  Synthetic polynucleotide
cuucgaacuuucagaguauu

SEQ ID NO: 867 - RNA, 20 nt, Artificial Sequence
  Synthetic polynucleotide
uucgaacuuucagaguauug

SEQ ID NO: 868 - RNA, 20 nt, Artificial Sequence
  Synthetic polynucleotide
ucgaacuuucagaguauuga

SEQ ID NO: 869 - RNA, 20 nt, Artificial Sequence
  Synthetic polynucleotide
guuucagcucuucgaacuuu

SEQ ID NO: 870 - RNA, 20 nt, Artificial Sequence
  Synthetic polynucleotide
gggcuuugauccagucagug

SEQ ID NO: 871 - RNA, 20 nt, Artificial Sequence
  Synthetic polynucleotide
ggcuuugauccagucaguga

SEQ ID NO: 872 - RNA, 20 nt, Artificial Sequence
  Synthetic polynucleotide
cuuugauccagucagugaag

SEQ ID NO: 873 - RNA, 20 nt, Artificial Sequence
  Synthetic polynucleotide
cagucagugaagaagcuuuc

SEQ ID NO: 874 - RNA, 20 nt, Artificial Sequence
  Synthetic polynucleotide
uccagucagugaagaagcuu

SEQ ID NO: 875 - RNA, 20 nt, Artificial Sequence
  Synthetic polynucleotide
ggggcuuugauccagucagu

SEQ ID NO: 876 - RNA, 20 nt, Artificial Sequence
  Synthetic polynucleotide
aauuggacuacagcuguuca

SEQ ID NO: 877 - RNA, 20 nt, Artificial Sequence
  Synthetic polynucleotide
auuggacuacagcuguucau

SEQ ID NO: 878 - RNA, 20 nt, Artificial Sequence
  Synthetic polynucleotide
uuggacuacagcuguucaug

SEQ ID NO: 879 - RNA, 20 nt, Artificial Sequence
  Synthetic polynucleotide
acagcuguucaugggaaacc

SEQ ID NO: 880 - RNA, 20 nt, Artificial Sequence
  Synthetic polynucleotide
agcuguucaugggaaaccug

SEQ ID NO: 881 - RNA, 20 nt, Artificial Sequence
  Synthetic polynucleotide
aaauguuuucgaaauucacu

SEQ ID NO: 882 - RNA, 20 nt, Artificial Sequence
  Synthetic polynucleotide
cgaaauucacuugaaaauaa

SEQ ID NO: 883 - RNA, 20 nt, Artificial Sequence
  Synthetic polynucleotide
aauguuuucgaaauucacuu

SEQ ID NO: 884 - RNA, 20 nt, Artificial Sequence
  Synthetic polynucleotide
guuuucgaaauucacuugaa

SEQ ID NO: 885 - RNA, 20 nt, Artificial Sequence
  Synthetic polynucleotide
cucguguguagucagugucc

SEQ ID NO: 886 - RNA, 20 nt, Artificial Sequence
  Synthetic polynucleotide
ucguguguagucagugucca

SEQ ID NO: 887 - RNA, 20 nt, Artificial Sequence
  Synthetic polynucleotide
cguguguagucaguguccag

SEQ ID NO: 888 - RNA, 20 nt, Artificial Sequence
  Synthetic polynucleotide
guguguagucaguguccaga

SEQ ID NO: 889 - RNA, 20 nt, Artificial Sequence
  Synthetic polynucleotide
uguguagucaguguccagag

SEQ ID NO: 890 - RNA, 20 nt, Artificial Sequence
  Synthetic polynucleotide
aguguccagagggguacacc

SEQ ID NO: 891 - RNA, 20 nt, Artificial Sequence
  Synthetic polynucleotide
cguguguagucaguguccag

SEQ ID NO: 892 - RNA, 20 nt, Artificial Sequence
  Synthetic polynucleotide
cguguguagucaguguccag

SEQ ID NO: 893 - RNA, 20 nt, Artificial Sequence
  Synthetic polynucleotide
cagcugaaagugucaaagcu

SEQ ID NO: 894 - RNA, 20 nt, Artificial Sequence
  Synthetic polynucleotide
aggcccagcugaaaguguca

SEQ ID NO: 895 - RNA, 20 nt, Artificial Sequence
  Synthetic polynucleotide
gcuaagaaggcccagcugaa

SEQ ID NO: 896 - RNA, 20 nt, Artificial Sequence
  Synthetic polynucleotide
aaggcuaagaaggcccagcu

SEQ ID NO: 897 - RNA, 20 nt, Artificial Sequence
  Synthetic polynucleotide
ggcuaaugacccaagauuac

SEQ ID NO: 898 - RNA, 20 nt, Artificial Sequence
  Synthetic polynucleotide
gcuaaugacccaagauuacu

SEQ ID NO: 899 - RNA, 20 nt, Artificial Sequence
  Synthetic polynucleotide
cuaaugacccaagauuacug

SEQ ID NO: 900 - RNA, 20 nt, Artificial Sequence
  Synthetic polynucleotide
ucccaguaaucuugggucau

SEQ ID NO: 901 - RNA, 20 nt, Artificial Sequence
  Synthetic polynucleotide
aagguuuucccaguaaucuu

SEQ ID NO: 902 - RNA, 20 nt, Artificial Sequence
  Synthetic polynucleotide
aaagguuuucccaguaaucu

SEQ ID NO: 903 - RNA, 20 nt, Artificial Sequence
  Synthetic polynucleotide
uaaagguuuucccaguaauc

SEQ ID NO: 904 - RNA, 20 nt, Artificial Sequence
  Synthetic polynucleotide
uuuaccaacaggugaguacc

SEQ ID NO: 905 - RNA, 20 nt, Artificial Sequence
  Synthetic polynucleotide
uuaccaacaggugaguacca

SEQ ID NO: 906 - RNA, 20 nt, Artificial Sequence
  Synthetic polynucleotide
uaccaacaggugaguaccaa

SEQ ID NO: 907 - RNA, 20 nt, Artificial Sequence
  Synthetic polynucleotide
accaacaggugaguaccaag

SEQ ID NO: 908 - RNA, 20 nt, Artificial Sequence
  Synthetic polynucleotide
uuaccaacaggugaguacca

SEQ ID NO: 909 - RNA, 20 nt, Artificial Sequence
  Synthetic polynucleotide
uuuaccaacaggugaguacc

SEQ ID NO: 910 - RNA, 20 nt, Artificial Sequence
  Synthetic polynucleotide
uuaccaacaggugaguacca

SEQ ID NO: 911 - RNA, 20 nt, Artificial Sequence
  Synthetic polynucleotide
uaccaacaggugaguaccaa

SEQ ID NO: 912 - RNA, 20 nt, Artificial Sequence
  Synthetic polynucleotide
accaacaggugaguaccaag

SEQ ID NO: 913 - RNA, 20 nt, Artificial Sequence
  Synthetic polynucleotide
uuaccaacaggugaguacca

SEQ ID NO: 914 - RNA, 20 nt, Artificial Sequence
  Synthetic polynucleotide
gaacagaaccaggcaaacau

SEQ ID NO: 915 - RNA, 20 nt, Artificial Sequence
  Synthetic polynucleotide
acagaaccaggcaaacauug

SEQ ID NO: 916 - RNA, 20 nt, Artificial Sequence
  Synthetic polynucleotide
cagaaccaggcaaacauuga

SEQ ID NO: 917 - RNA, 20 nt, Artificial Sequence
  Synthetic polynucleotide
aacagaaccaggcaaacauu

SEQ ID NO: 918 - RNA, 20 nt, Artificial Sequence
  Synthetic polynucleotide
gaaccaggcaaacauugaag

SEQ ID NO: 919 - RNA, 20 nt, Artificial Sequence
  Synthetic polynucleotide
agaagcuaaacagaaagaau

SEQ ID NO: 920 - RNA, 20 nt, Artificial Sequence
  Synthetic polynucleotide
gaagcuaaacagaaagaauu

SEQ ID NO: 921 - RNA, 20 nt, Artificial Sequence
  Synthetic polynucleotide
agaaagaauuagaauuucaa

SEQ ID NO: 922 - RNA, 20 nt, Artificial Sequence
  Synthetic polynucleotide
agaagcuaaacagaaagaau

SEQ ID NO: 923 - RNA, 20 nt, Artificial Sequence
  Synthetic polynucleotide
cagaaagaauuagaauuuca

SEQ ID NO: 924 - RNA, 20 nt, Artificial Sequence
  Synthetic polynucleotide
aagaagcuaaacagaaagaa

SEQ ID NO: 925 - RNA, 20 nt, Artificial Sequence
  Synthetic polynucleotide
auuagaauuucaacagaugu

SEQ ID NO: 926 - RNA, 20 nt, Artificial Sequence
  Synthetic polynucleotide
uuagaauuucaacagauguu

SEQ ID NO: 927 - RNA, 20 nt, Artificial Sequence
  Synthetic polynucleotide
uuagaauuucaacagauguu

SEQ ID NO: 928 - RNA, 20 nt, Artificial Sequence
  Synthetic polynucleotide
aaaaaagagcaagaagaagc

SEQ ID NO: 929 - RNA, 20 nt, Artificial Sequence
  Synthetic polynucleotide
aaaaagagcaagaagaagcu

SEQ ID NO: 930 - RNA, 20 nt, Artificial Sequence
  Synthetic polynucleotide
aaaagagcaagaagaagcug

SEQ ID NO: 931 - RNA, 20 nt, Artificial Sequence
  Synthetic polynucleotide
aaaaaagagcaagaagaagc

SEQ ID NO: 932 - RNA, 20 nt, Artificial Sequence
  Synthetic polynucleotide
aagaaucaaaagaagcucuc

SEQ ID NO: 933 - RNA, 20 nt, Artificial Sequence
  Synthetic polynucleotide
agaaucaaaagaagcucucc

SEQ ID NO: 934 - RNA, 20 nt, Artificial Sequence
  Synthetic polynucleotide
aaucaaaagaagcucuccag

SEQ ID NO: 935 - RNA, 20 nt, Artificial Sequence
  Synthetic polynucleotide
aucaaaagaagcucuccagu

SEQ ID NO: 936 - RNA, 20 nt, Artificial Sequence
  Synthetic polynucleotide
ucaaaagaagcucuccagug

SEQ ID NO: 937 - RNA, 20 nt, Artificial Sequence
  Synthetic polynucleotide
caaaagaagcucuccagugg

SEQ ID NO: 938 - RNA, 20 nt, Artificial Sequence
  Synthetic polynucleotide
aaaagaagcucuccagugga

SEQ ID NO: 939 - RNA, 20 nt, Artificial Sequence
  Synthetic polynucleotide
aaaagaaucaaaagaagcuc

SEQ ID NO: 940 - RNA, 20 nt, Artificial Sequence
  Synthetic polynucleotide
aaucaaaagaagcucuccag

SEQ ID NO: 941 - RNA, 20 nt, Artificial Sequence
  Synthetic polynucleotide
gaagggcauaggcgagcaca

SEQ ID NO: 942 - RNA, 20 nt, Artificial Sequence
  Synthetic polynucleotide
ggcauaggcgagcacaugaa

SEQ ID NO: 943 - RNA, 20 nt, Artificial Sequence
  Synthetic polynucleotide
gcauaggcgagcacaugaaa

SEQ ID NO: 944 - RNA, 20 nt, Artificial Sequence
  Synthetic polynucleotide
cauaggcgagcacaugaaaa

SEQ ID NO: 945 - RNA, 20 nt, Artificial Sequence
  Synthetic polynucleotide
auaggcgagcacaugaaaag

SEQ ID NO: 946 - RNA, 20 nt, Artificial Sequence
  Synthetic polynucleotide
gcauaggcgagcacaugaaa

SEQ ID NO: 947 - RNA, 20 nt, Artificial Sequence
  Synthetic polynucleotide
uacccccaaucagguaccac

SEQ ID NO: 948 - RNA, 20 nt, Artificial Sequence
  Synthetic polynucleotide
aucagguaccacccaaauug

SEQ ID NO: 949 - RNA, 20 nt, Artificial Sequence
  Synthetic polynucleotide
uuuucugcaaggcgaagcag

SEQ ID NO: 950 - RNA, 20 nt, Artificial Sequence
  Synthetic polynucleotide
uuucugcaaggcgaagcagc

SEQ ID NO: 951 - RNA, 20 nt, Artificial Sequence
  Synthetic polynucleotide
gcaaggcgaagcagcagaac

SEQ ID NO: 952 - RNA, 20 nt, Artificial Sequence
  Synthetic polynucleotide
cugcaaggcgaagcagcaga

SEQ ID NO: 953 - RNA, 20 nt, Artificial Sequence
  Synthetic polynucleotide
gaagcagcagaacaagucuu

SEQ ID NO: 954 - RNA, 20 nt, Artificial Sequence
  Synthetic polynucleotide
guuugugccccacagacccc

SEQ ID NO: 955 - RNA, 20 nt, Artificial Sequence
  Synthetic polynucleotide
uuugugccccacagacccca

SEQ ID NO: 956 - RNA, 20 nt, Artificial Sequence
  Synthetic polynucleotide
uugugccccacagaccccag

SEQ ID NO: 957 - RNA, 20 nt, Artificial Sequence
  Synthetic polynucleotide
ugugccccacagaccccagg

SEQ ID NO: 958 - RNA, 20 nt, Artificial Sequence
  Synthetic polynucleotide
ugccccacagaccccaggag

SEQ ID NO: 959 - RNA, 20 nt, Artificial Sequence
  Synthetic polynucleotide
cacagaccccaggagcgacg

SEQ ID NO: 960 - RNA, 20 nt, Artificial Sequence
  Synthetic polynucleotide
agaccccaggagcgacgcag

SEQ ID NO: 961 - RNA, 20 nt, Artificial Sequence
  Synthetic polynucleotide
acagaccccaggagcgacgc

SEQ ID NO: 962 - RNA, 20 nt, Artificial Sequence
  Synthetic polynucleotide
guuugugccccacagacccc

SEQ ID NO: 963 - RNA, 20 nt, Artificial Sequence
  Synthetic polynucleotide
agaccccaggagcgacgcag

SEQ ID NO: 964 - RNA, 20 nt, Artificial Sequence
  Synthetic polynucleotide
gagcgacgcagcaguaacau

SEQ ID NO: 965 - RNA, 20 nt, Artificial Sequence
  Synthetic polynucleotide
aguaacaucagccaagccag

SEQ ID NO: 966 - RNA, 20 nt, Artificial Sequence
  Synthetic polynucleotide
guaacaucagccaagccagu

SEQ ID NO: 967 - RNA, 20 nt, Artificial Sequence
  Synthetic polynucleotide
caguaacaucagccaagcca

SEQ ID NO: 968 - RNA, 20 nt, Artificial Sequence
  Synthetic polynucleotide
agccaagccaguaggucccc

SEQ ID NO: 969 - RNA, 20 nt, Artificial Sequence
  Synthetic polynucleotide
ccccaauggacagcuucugc

SEQ ID NO: 970 - RNA, 20 nt, Artificial Sequence
  Synthetic polynucleotide
cccaauggacagcuucugcc

SEQ ID NO: 971 - RNA, 20 nt, Artificial Sequence
  Synthetic polynucleotide
ccaauggacagcuucugcca

SEQ ID NO: 972 - RNA, 20 nt, Artificial Sequence
  Synthetic polynucleotide
caauggacagcuucugccag

SEQ ID NO: 973 - RNA, 20 nt, Artificial Sequence
  Synthetic polynucleotide
aauggacagcuucugccaga

SEQ ID NO: 974 - RNA, 20 nt, Artificial Sequence
  Synthetic polynucleotide
uggacagcuucugccagagg

SEQ ID NO: 975 - RNA, 20 nt, Artificial Sequence
  Synthetic polynucleotide
cccaauggacagcuucugcc

SEQ ID NO: 976 - RNA, 20 nt, Artificial Sequence
  Synthetic polynucleotide
aauggacagcuucugccaga

SEQ ID NO: 977 - RNA, 20 nt, Artificial Sequence
  Synthetic polynucleotide
ggacagcuucugccagaggu

SEQ ID NO: 978 - RNA, 20 nt, Artificial Sequence
  Synthetic polynucleotide
agcuucugccagaggugaua

SEQ ID NO: 979 - RNA, 20 nt, Artificial Sequence
  Synthetic polynucleotide
caauggacagcuucugccag

SEQ ID NO: 980 - RNA, 20 nt, Artificial Sequence
  Synthetic polynucleotide
gcacgaccaaucaaauacac

SEQ ID NO: 981 - RNA, 20 nt, Artificial Sequence
  Synthetic polynucleotide
cacgaccaaucaaauacaca

SEQ ID NO: 982 - RNA, 20 nt, Artificial Sequence
  Synthetic polynucleotide
accaaucaaauacacaagaa

SEQ ID NO: 983 - RNA, 20 nt, Artificial Sequence
  Synthetic polynucleotide
ccaaucaaauacacaagaaa

SEQ ID NO: 984 - RNA, 20 nt, Artificial Sequence
  Synthetic polynucleotide
caaucaaauacacaagaaaa

SEQ ID NO: 985 - RNA, 20 nt, Artificial Sequence
  Synthetic polynucleotide
ggcacgaccaaucaaauaca

SEQ ID NO: 986 - RNA, 20 nt, Artificial Sequence
  Synthetic polynucleotide
ccaaucaaauacacaagaaa

SEQ ID NO: 987 - RNA, 20 nt, Artificial Sequence
  Synthetic polynucleotide
caaccucagacagagagcaa

SEQ ID NO: 988 - RNA, 20 nt, Artificial Sequence
  Synthetic polynucleotide
aaccucagacagagagcaau

SEQ ID NO: 989 - RNA, 20 nt, Artificial Sequence
  Synthetic polynucleotide
cucagacagagagcaaugag

SEQ ID NO: 990 - RNA, 20 nt, Artificial Sequence
  Synthetic polynucleotide
ucagacagagagcaaugagu

SEQ ID NO: 991 - RNA, 20 nt, Artificial Sequence
  Synthetic polynucleotide
cagacagagagcaaugagua

SEQ ID NO: 992 - RNA, 20 nt, Artificial Sequence
  Synthetic polynucleotide
gaucccaaccucagacagag

SEQ ID NO: 993 - RNA, 20 nt, Artificial Sequence
  Synthetic polynucleotide
ccaaccucagacagagagca

SEQ ID NO: 994 - RNA, 20 nt, Artificial Sequence
  Synthetic polynucleotide
ccagacaaaaauguccaccu

SEQ ID NO: 995 - RNA, 20 nt, Artificial Sequence
  Synthetic polynucleotide
cagacaaaaauguccaccuu

SEQ ID NO: 996 - RNA, 20 nt, Artificial Sequence
  Synthetic polynucleotide
gacaaaaauguccaccuugg

SEQ ID NO: 997 - RNA, 20 nt, Artificial Sequence
  Synthetic polynucleotide
guccagacaaaaauguccac

SEQ ID NO: 998 - RNA, 20 nt, Artificial Sequence
  Synthetic polynucleotide
cagacaaaaauguccaccuu

SEQ ID NO: 999 - RNA, 20 nt, Artificial Sequence
  Synthetic polynucleotide
ccagacaaaaauguccaccu

SEQ ID NO: 1000 - RNA, 20 nt, Artificial Sequence
  Synthetic polynucleotide
caagguggacauuuuugucu

SEQ ID NO: 1001 - RNA, 20 nt, Artificial Sequence
  Synthetic polynucleotide
ccaagguggacauuuuuguc

SEQ ID NO: 1002 - RNA, 20 nt, Artificial Sequence
  Synthetic polynucleotide
caaaucuguaccaccaaggu

SEQ ID NO: 1003 - RNA, 20 nt, Artificial Sequence
  Synthetic polynucleotide
gcaaaucuguaccaccaagg

SEQ ID NO: 1004 - RNA, 20 nt, Artificial Sequence
  Synthetic polynucleotide
aauuccagaucaagaauuug

SEQ ID NO: 1005 - RNA, 20 nt, Artificial Sequence
  Synthetic polynucleotide
gcaauuccagaucaagaauu

SEQ ID NO: 1006 - RNA, 20 nt, Artificial Sequence
  Synthetic polynucleotide
uccagaucaagaauuugugu

SEQ ID NO: 1007 - RNA, 20 nt, Artificial Sequence
  Synthetic polynucleotide
uauggagagcaauuccagau

SEQ ID NO: 1008 - RNA, 20 nt, Artificial Sequence
  Synthetic polynucleotide
ccaauauggagagcaauucc

SEQ ID NO: 1009 - RNA, 20 nt, Artificial Sequence
  Synthetic polynucleotide
uccaauauggagagcaauuc

SEQ ID NO: 1010 - RNA, 20 nt, Artificial Sequence
  Synthetic polynucleotide
ugaauuuuauccaauaugga

SEQ ID NO: 1011 - RNA, 20 nt, Artificial Sequence
  Synthetic polynucleotide
uugaauuuuauccaauaugg

SEQ ID NO: 1012 - RNA, 20 nt, Artificial Sequence
  Synthetic polynucleotide
auccaauauggagagcaauu

SEQ ID NO: 1013 - RNA, 20 nt, Artificial Sequence
  Synthetic polynucleotide
gaauuuuauccaauauggag

SEQ ID NO: 1014 - RNA, 20 nt, Artificial Sequence
  Synthetic polynucleotide
augaguauuuccaaguaggc

SEQ ID NO: 1015 - RNA, 20 nt, Artificial Sequence
  Synthetic polynucleotide
ugaguauuuccaaguaggcu

SEQ ID NO: 1016 - RNA, 20 nt, Artificial Sequence
  Synthetic polynucleotide
caaguaggcuggaauauuuu

SEQ ID NO: 1017 - RNA, 20 nt, Artificial Sequence
  Synthetic polynucleotide
augaguauuuccaaguaggc

SEQ ID NO: 1018 - RNA, 20 nt, Artificial Sequence
  Synthetic polynucleotide
aaaaauauuccagccuacuu

SEQ ID NO: 1019 - RNA, 20 nt, Artificial Sequence
  Synthetic polynucleotide
caaaaauauuccagccuacu

SEQ ID NO: 1020 - RNA, 20 nt, Artificial Sequence
  Synthetic polynucleotide
aaaaauauuccagccuacuu

SEQ ID NO: 1021 - RNA, 20 nt, Artificial Sequence
  Synthetic polynucleotide
uugucaguucugcgaucauu

SEQ ID NO: 1022 - RNA, 20 nt, Artificial Sequence
  Synthetic polynucleotide
ugucaguucugcgaucauuc

SEQ ID NO: 1023 - RNA, 20 nt, Artificial Sequence
  Synthetic polynucleotide
aguucugcgaucauucagac

SEQ ID NO: 1024 - RNA, 20 nt, Artificial Sequence
  Synthetic polynucleotide
ucaguucugcgaucauucag

SEQ ID NO: 1025 - RNA, 20 nt, Artificial Sequence
  Synthetic polynucleotide
gcuuuuagcuccgagucuuc

SEQ ID NO: 1026 - RNA, 20 nt, Artificial Sequence
  Synthetic polynucleotide
uuagcuccgagucuucaagu

SEQ ID NO: 1027 - RNA, 20 nt, Artificial Sequence
  Synthetic polynucleotide
gcuccgagucuucaaguugg

SEQ ID NO: 1028 - RNA, 20 nt, Artificial Sequence
  Synthetic polynucleotide
ccaggauuuugccaacuuga

SEQ ID NO: 1029 - RNA, 20 nt, Artificial Sequence
  Synthetic polynucleotide
gccaggauuuugccaacuug

SEQ ID NO: 1030 - RNA, 20 nt, Artificial Sequence
  Synthetic polynucleotide
uggccaggauuuugccaacu

SEQ ID NO: 1031 - RNA, 20 nt, Artificial Sequence
  Synthetic polynucleotide
guggucggcaugcagcucuu

SEQ ID NO: 1032 - RNA, 20 nt, Artificial Sequence
  Synthetic polynucleotide
ucggcaugcagcucuuuggu

SEQ ID NO: 1033 - RNA, 20 nt, Artificial Sequence
  Synthetic polynucleotide
cggcaugcagcucuuuggua

SEQ ID NO: 1034 - RNA, 20 nt, Artificial Sequence
  Synthetic polynucleotide
ggcaugcagcucuuugguaa

SEQ ID NO: 1035 - RNA, 20 nt, Artificial Sequence
  Synthetic polynucleotide
agcucuuugguaagagcuac

SEQ ID NO: 1036 - RNA, 20 nt, Artificial Sequence
  Synthetic polynucleotide
ugugccaccgugggagcgua

SEQ ID NO: 1037 - RNA, 20 nt, Artificial Sequence
  Synthetic polynucleotide
cguucaugugccaccguggg

SEQ ID NO: 1038 - RNA, 20 nt, Artificial Sequence
  Synthetic polynucleotide
ucguucaugugccaccgugg

SEQ ID NO: 1039 - RNA, 20 nt, Artificial Sequence
  Synthetic polynucleotide
caugugccaccgugggagcg

SEQ ID NO: 1040 - RNA, 20 nt, Artificial Sequence
  Synthetic polynucleotide
agucguucaugugccaccgu

SEQ ID NO: 1041 - RNA, 20 nt, Artificial Sequence
  Synthetic polynucleotide
ccacucuccacacagcacgc

SEQ ID NO: 1042 - RNA, 20 nt, Artificial Sequence
  Synthetic polynucleotide
uccacucuccacacagcacg

SEQ ID NO: 1043 - RNA, 20 nt, Artificial Sequence
  Synthetic polynucleotide
uauccacucuccacacagca

SEQ ID NO: 1044 - RNA, 20 nt, Artificial Sequence
  Synthetic polynucleotide
gucucuauccacucuccaca

SEQ ID NO: 1045 - RNA, 20 nt, Artificial Sequence
  Synthetic polynucleotide
ggaggucgcuggucaagcua

SEQ ID NO: 1046 - RNA, 20 nt, Artificial Sequence
  Synthetic polynucleotide
gcaaacaaccuccagauugc

SEQ ID NO: 1047 - RNA, 20 nt, Artificial Sequence
  Synthetic polynucleotide
aaacaaccuccagauugcag

SEQ ID NO: 1048 - RNA, 20 nt, Artificial Sequence
  Synthetic polynucleotide
aaccuccagauugcagugac

SEQ ID NO: 1049 - RNA, 20 nt, Artificial Sequence
  Synthetic polynucleotide
accuccagauugcagugacu

SEQ ID NO: 1050 - RNA, 20 nt, Artificial Sequence
  Synthetic polynucleotide
aaccuccagauugcagugac

SEQ ID NO: 1051 - RNA, 20 nt, Artificial Sequence
  Synthetic polynucleotide
caaccuccagauugcaguga

SEQ ID NO: 1052 - RNA, 20 nt, Artificial Sequence
  Synthetic polynucleotide
auuaugugaaacaaaccuua

SEQ ID NO: 1053 - RNA, 20 nt, Artificial Sequence
  Synthetic polynucleotide
uaugugaaacaaaccuuacg

SEQ ID NO: 1054 - RNA, 20 nt, Artificial Sequence
  Synthetic polynucleotide
uuaugugaaacaaaccuuac

SEQ ID NO: 1055 - RNA, 20 nt, Artificial Sequence
  Synthetic polynucleotide
cagggagauaagacaagcag

SEQ ID NO: 1056 - RNA, 20 nt, Artificial Sequence
  Synthetic polynucleotide
agggagauaagacaagcaga

SEQ ID NO: 1057 - RNA, 20 nt, Artificial Sequence
  Synthetic polynucleotide
gauaagacaagcagaagauc

SEQ ID NO: 1058 - RNA, 20 nt, Artificial Sequence
  Synthetic polynucleotide
aagcagaagaucugaauacu

SEQ ID NO: 1059 - RNA, 20 nt, Artificial Sequence
  Synthetic polynucleotide
agauaagacaagcagaagau

SEQ ID NO: 1060 - RNA, 20 nt, Artificial Sequence
  Synthetic polynucleotide
gugauggucaaucauuuauu

SEQ ID NO: 1061 - RNA, 20 nt, Artificial Sequence
  Synthetic polynucleotide
cauacacaaccugacaagaa

SEQ ID NO: 1062 - RNA, 20 nt, Artificial Sequence
  Synthetic polynucleotide
ccauacacaaccugacaaga

SEQ ID NO: 1063 - RNA, 20 nt, Artificial Sequence
  Synthetic polynucleotide
ccuccauacacaaccugaca

SEQ ID NO: 1064 - RNA, 20 nt, Artificial Sequence
  Synthetic polynucleotide
accuccauacacaaccugac

SEQ ID NO: 1065 - RNA, 20 nt, Artificial Sequence
  Synthetic polynucleotide
gagaaccuccauacacaacc

SEQ ID NO: 1066 - RNA, 20 nt, Artificial Sequence
  Synthetic polynucleotide
aaccuccauacacaaccuga

SEQ ID NO: 1067 - RNA, 20 nt, Artificial Sequence
  Synthetic polynucleotide
cucaugcugccaaguuaaca

SEQ ID NO: 1068 - RNA, 20 nt, Artificial Sequence
  Synthetic polynucleotide
cucaugcugccaaguuaaca

SEQ ID NO: 1069 - RNA, 20 nt, Artificial Sequence
  Synthetic polynucleotide
ucaugcugccaaguuaacau

SEQ ID NO: 1070 - RNA, 20 nt, Artificial Sequence
  Synthetic polynucleotide
caugcugccaaguuaacaua

SEQ ID NO: 1071 - RNA, 20 nt, Artificial Sequence
  Synthetic polynucleotide
cugccaaguuaacauagagu

SEQ ID NO: 1072 - RNA, 20 nt, Artificial Sequence
  Synthetic polynucleotide
ugccaaguuaacauagaguc

SEQ ID NO: 1073 - RNA, 20 nt, Artificial Sequence
  Synthetic polynucleotide
gccaaguuaacauagaguca

SEQ ID NO: 1074 - RNA, 20 nt, Artificial Sequence
  Synthetic polynucleotide
ccaaguuaacauagagucag

SEQ ID NO: 1075 - RNA, 20 nt, Artificial Sequence
  Synthetic polynucleotide
caccagauuuuuccuuuccc

SEQ ID NO: 1076 - RNA, 20 nt, Artificial Sequence
  Synthetic polynucleotide
aacuguguucaacaaucuug

SEQ ID NO: 1077 - RNA, 20 nt, Artificial Sequence
  Synthetic polynucleotide
cuuucaaaccaacuguguuc

SEQ ID NO: 1078 - RNA, 20 nt, Artificial Sequence
  Synthetic polynucleotide
uccauuuuagaagcauuucc

SEQ ID NO: 1079 - RNA, 20 nt, Artificial Sequence
  Synthetic polynucleotide
auccauuuuagaagcauuuc

SEQ ID NO: 1080 - RNA, 20 nt, Artificial Sequence
  Synthetic polynucleotide
ccauaugcuauccauuuuag

SEQ ID NO: 1081 - RNA, 20 nt, Artificial Sequence
  Synthetic polynucleotide
auccauuuuagaagcauuuc

SEQ ID NO: 1082 - RNA, 20 nt, Artificial Sequence
  Synthetic polynucleotide
uauccauuuuagaagcauuu

SEQ ID NO: 1083 - RNA, 20 nt, Artificial Sequence
  Synthetic polynucleotide
auaaccauaugcuauccauu

SEQ ID NO: 1084 - RNA, 20 nt, Artificial Sequence
  Synthetic polynucleotide
cagccaacaccaggcauugg

SEQ ID NO: 1085 - RNA, 20 nt, Artificial Sequence
  Synthetic polynucleotide
uccagccaacaccaggcauu

SEQ ID NO: 1086 - RNA, 20 nt, Artificial Sequence
  Synthetic polynucleotide
cagccaacaccaggcauugg

SEQ ID NO: 1087 - RNA, 20 nt, Artificial Sequence
  Synthetic polynucleotide
aaauccagccaacaccaggc

SEQ ID NO: 1088 - RNA, 20 nt, Artificial Sequence
  Synthetic polynucleotide
auccagccaacaccaggcau

SEQ ID NO: 1089 - RNA, 20 nt, Artificial Sequence
  Synthetic polynucleotide
auccagccaacaccaggcau

SEQ ID NO: 1090 - RNA, 20 nt, Artificial Sequence
  Synthetic polynucleotide
cagaauauaagacacacaag

SEQ ID NO: 1091 - RNA, 20 nt, Artificial Sequence
  Synthetic polynucleotide
agccagaauauaagacacac

SEQ ID NO: 1092 - RNA, 20 nt, Artificial Sequence
  Synthetic polynucleotide
ugaauaucagccagaauaua

SEQ ID NO: 1093 - RNA, 20 nt, Artificial Sequence
  Synthetic polynucleotide
cugaauaucagccagaauau

SEQ ID NO: 1094 - RNA, 20 nt, Artificial Sequence
  Synthetic polynucleotide
ucagccagaauauaagacac

SEQ ID NO: 1095 - RNA, 20 nt, Artificial Sequence
  Synthetic polynucleotide
agucaaguuccaaaucguuc

SEQ ID NO: 1096 - RNA, 20 nt, Artificial Sequence
  Synthetic polynucleotide
aagucaaguuccaaaucguu

SEQ ID NO: 1097 - RNA, 20 nt, Artificial Sequence
  Synthetic polynucleotide
ugaauguuagucaaaaugug

SEQ ID NO: 1098 - RNA, 20 nt, Artificial Sequence
  Synthetic polynucleotide
auguuagucaaaaugugcga

SEQ ID NO: 1099 - RNA, 20 nt, Artificial Sequence
  Synthetic polynucleotide
uguuagucaaaaugugcgau

SEQ ID NO: 1100 - RNA, 20 nt, Artificial Sequence
  Synthetic polynucleotide
uaugaauguuagucaaaaug

SEQ ID NO: 1101 - RNA, 20 nt, Artificial Sequence
  Synthetic polynucleotide
aaaugugcgauggaaaaacc

SEQ ID NO: 1102 - RNA, 20 nt, Artificial Sequence
  Synthetic polynucleotide
ugugcgauggaaaaaccuga

SEQ ID NO: 1103 - RNA, 20 nt, Artificial Sequence
  Synthetic polynucleotide
gugcgauggaaaaaccugaa

SEQ ID NO: 1104 - RNA, 20 nt, Artificial Sequence
  Synthetic polynucleotide
gcgauggaaaaaccugaaag

SEQ ID NO: 1105 - RNA, 20 nt, Artificial Sequence
  Synthetic polynucleotide
aaugugcgauggaaaaaccu

SEQ ID NO: 1106 - RNA, 20 nt, Artificial Sequence
  Synthetic polynucleotide
gguuuuuccaucgcacauuu

SEQ ID NO: 1107 - RNA, 20 nt, Artificial Sequence
  Synthetic polynucleotide
uauucuuaaaggcaacuuuu

SEQ ID NO: 1108 - RNA, 20 nt, Artificial Sequence
  Synthetic polynucleotide
auucuuaaaggcaacuuuua

SEQ ID NO: 1109 - RNA, 20 nt, Artificial Sequence
  Synthetic polynucleotide
uucuuaaaggcaacuuuuaa

SEQ ID NO: 1110 - RNA, 20 nt, Artificial Sequence
  Synthetic polynucleotide
ucuuaaaggcaacuuuuaag

SEQ ID NO: 1111 - RNA, 20 nt, Artificial Sequence
  Synthetic polynucleotide
uaaaggcaacuuuuaaggga

SEQ ID NO: 1112 - RNA, 20 nt, Artificial Sequence
  Synthetic polynucleotide
aaaggcaacuuuuaagggau

SEQ ID NO: 1113 - RNA, 20 nt, Artificial Sequence
  Synthetic polynucleotide
ggcaacuuuuaagggaugga

SEQ ID NO: 1114 - RNA, 20 nt, Artificial Sequence
  Synthetic polynucleotide
auucuuaaaggcaacuuuua

SEQ ID NO: 1115 - RNA, 20 nt, Artificial Sequence
  Synthetic polynucleotide
aaggcaacuuuuaagggaug

SEQ ID NO: 1116 - RNA, 20 nt, Artificial Sequence
  Synthetic polynucleotide
aucccuuaaaaguugccuuu

SEQ ID NO: 1117 - RNA, 20 nt, Artificial Sequence
  Synthetic polynucleotide
aauaaucguccaucccuuaa

SEQ ID NO: 1118 - RNA, 20 nt, Artificial Sequence
  Synthetic polynucleotide
aucccuuaaaaguugccuuu

SEQ ID NO: 1119 - RNA, 20 nt, Artificial Sequence
  Synthetic polynucleotide
auaauaaucguccaucccuu

SEQ ID NO: 1120 - RNA, 20 nt, Artificial Sequence
  Synthetic polynucleotide
caucccuuaaaaguugccuu

SEQ ID NO: 1121 - RNA, 20 nt, Artificial Sequence
  Synthetic polynucleotide
guagacaagcagcccaaaua

SEQ ID NO: 1122 - RNA, 20 nt, Artificial Sequence
  Synthetic polynucleotide
aagcagcccaaauaugaaua

SEQ ID NO: 1123 - RNA, 20 nt, Artificial Sequence
  Synthetic polynucleotide
cauagauaauuucaaccaac

SEQ ID NO: 1124 - RNA, 20 nt, Artificial Sequence
  Synthetic polynucleotide
auaauuucaaccaacagaaa

SEQ ID NO: 1125 - RNA, 20 nt, Artificial Sequence
  Synthetic polynucleotide
uaauuucaaccaacagaaaa

SEQ ID NO: 1126 - RNA, 20 nt, Artificial Sequence
  Synthetic polynucleotide
auuucaaccaacagaaaaag

SEQ ID NO: 1127 - RNA, 20 nt, Artificial Sequence
  Synthetic polynucleotide
uuucaaccaacagaaaaaga

SEQ ID NO: 1128 - RNA, 20 nt, Artificial Sequence
  Synthetic polynucleotide
aaccaacagaaaaagaagau

SEQ ID NO: 1129 - RNA, 20 nt, Artificial Sequence
  Synthetic polynucleotide
aauuucaaccaacagaaaaa

SEQ ID NO: 1130 - RNA, 20 nt, Artificial Sequence
  Synthetic polynucleotide
ucaaccaacagaaaaagaag

SEQ ID NO: 1131 - RNA, 20 nt, Artificial Sequence
  Synthetic polynucleotide
gauaauuucaaccaacagaa

SEQ ID NO: 1132 - RNA, 20 nt, Artificial Sequence
  Synthetic polynucleotide
auuucaaccaacagaaaaag

SEQ ID NO: 1133 - RNA, 20 nt, Artificial Sequence
  Synthetic polynucleotide
uuucaaccaacagaaaaaga

SEQ ID NO: 1134 - RNA, 20 nt, Artificial Sequence
  Synthetic polynucleotide
aaccaacagaaaaagaagau

SEQ ID NO: 1135 - RNA, 20 nt, Artificial Sequence
  Synthetic polynucleotide
aauuucaaccaacagaaaaa

SEQ ID NO: 1136 - RNA, 20 nt, Artificial Sequence
  Synthetic polynucleotide
ucaaccaacagaaaaagaag

SEQ ID NO: 1137 - RNA, 20 nt, Artificial Sequence
  Synthetic polynucleotide
agaaaaagaagauaaguauu

SEQ ID NO: 1138 - RNA, 20 nt, Artificial Sequence
  Synthetic polynucleotide
uggaggucaagacaucuuua

SEQ ID NO: 1139 - RNA, 20 nt, Artificial Sequence
  Synthetic polynucleotide
aggucaagacaucuuuauga

SEQ ID NO: 1140 - RNA, 20 nt, Artificial Sequence
  Synthetic polynucleotide
ggucaagacaucuuuaugac

SEQ ID NO: 1141 - RNA, 20 nt, Artificial Sequence
  Synthetic polynucleotide
ucaagacaucuuuaugacag

SEQ ID NO: 1142 - RNA, 20 nt, Artificial Sequence
  Synthetic polynucleotide
caagacaucuuuaugacaga

SEQ ID NO: 1143 - RNA, 20 nt, Artificial Sequence
  Synthetic polynucleotide
gaggucaagacaucuuuaug

SEQ ID NO: 1144 - RNA, 20 nt, Artificial Sequence
  Synthetic polynucleotide
gucaagacaucuuuaugaca

SEQ ID NO: 1145 - RNA, 20 nt, Artificial Sequence
  Synthetic polynucleotide
cagaagaacagaagaaauac

SEQ ID NO: 1146 - RNA, 20 nt, Artificial Sequence
  Synthetic polynucleotide
gaacagaagaaauacuauaa

SEQ ID NO: 1147 - RNA, 20 nt, Artificial Sequence
  Synthetic polynucleotide
agccacaaaagccaauuccu

SEQ ID NO: 1148 - RNA, 20 nt, Artificial Sequence
  Synthetic polynucleotide
acaaaagccaauuccucgac

SEQ ID NO: 1149 - RNA, 20 nt, Artificial Sequence
  Synthetic polynucleotide
caaaagccaauuccucgacc

SEQ ID NO: 1150 - RNA, 20 nt, Artificial Sequence
  Synthetic polynucleotide
aaaagccaauuccucgacca

SEQ ID NO: 1151 - RNA, 20 nt, Artificial Sequence
  Synthetic polynucleotide
aaagccaauuccucgaccag

SEQ ID NO: 1152 - RNA, 20 nt, Artificial Sequence
  Synthetic polynucleotide
aauuccucgaccagggguaa

SEQ ID NO: 1153 - RNA, 20 nt, Artificial Sequence
  Synthetic polynucleotide
aaaauccaaggauguauauu

SEQ ID NO: 1154 - RNA, 20 nt, Artificial Sequence
  Synthetic polynucleotide
ccaaggauguauauuugacc

SEQ ID NO: 1155 - RNA, 20 nt, Artificial Sequence
  Synthetic polynucleotide
caaggauguauauuugaccu

SEQ ID NO: 1156 - RNA, 20 nt, Artificial Sequence
  Synthetic polynucleotide
auccaaggauguauauuuga

SEQ ID NO: 1157 - RNA, 20 nt, Artificial Sequence
  Synthetic polynucleotide
cuagugacaaaucaagccuu

SEQ ID NO: 1158 - RNA, 20 nt, Artificial Sequence
  Synthetic polynucleotide
acaaaucaagccuuugauau

SEQ ID NO: 1159 - RNA, 20 nt, Artificial Sequence
  Synthetic polynucleotide
accuagugacaaaucaagcc

SEQ ID NO: 1160 - RNA, 20 nt, Artificial Sequence
  Synthetic polynucleotide
ugacaaaucaagccuuugau

SEQ ID NO: 1161 - RNA, 20 nt, Artificial Sequence
  Synthetic polynucleotide
ggagggucaaagucaacaua

SEQ ID NO: 1162 - RNA, 20 nt, Artificial Sequence
  Synthetic polynucleotide
ggucaaagucaacauaugac

SEQ ID NO: 1163 - RNA, 20 nt, Artificial Sequence
  Synthetic polynucleotide
ucaaagucaacauaugacug

SEQ ID NO: 1164 - RNA, 20 nt, Artificial Sequence
  Synthetic polynucleotide
ggucaaagucaacauaugac

SEQ ID NO: 1165 - RNA, 20 nt, Artificial Sequence
  Synthetic polynucleotide
ggucaaagucaacauaugac

SEQ ID NO: 1166 - RNA, 20 nt, Artificial Sequence
  Synthetic polynucleotide
ucaaagucaacauaugacug

SEQ ID NO: 1167 - RNA, 20 nt, Artificial Sequence
  Synthetic polynucleotide
ggucaaagucaacauaugac

SEQ ID NO: 1168 - RNA, 20 nt, Artificial Sequence
  Synthetic polynucleotide
auuuauccaauauaaaacuu

SEQ ID NO: 1169 - RNA, 20 nt, Artificial Sequence
  Synthetic polynucleotide
acauuuauccaauauaaaac

SEQ ID NO: 1170 - RNA, 20 nt, Artificial Sequence
  Synthetic polynucleotide
ccauccuacagugaaguagu

SEQ ID NO: 1171 - RNA, 20 nt, Artificial Sequence
  Synthetic polynucleotide
uccauccuacagugaaguag

SEQ ID NO: 1172 - RNA, 20 nt, Artificial Sequence
  Synthetic polynucleotide
uauuccauccuacagugaag

SEQ ID NO: 1173 - RNA, 20 nt, Artificial Sequence
  Synthetic polynucleotide
aaauauuccauccuacagug

SEQ ID NO: 1174 - RNA, 20 nt, Artificial Sequence
  Synthetic polynucleotide
aaaaauauuccauccuacag

SEQ ID NO: 1175 - RNA, 20 nt, Artificial Sequence
  Synthetic polynucleotide
ucaaaaauauuccauccuac

SEQ ID NO: 1176 - RNA, 20 nt, Artificial Sequence
  Synthetic polynucleotide
auuccauccuacagugaagu

SEQ ID NO: 1177 - RNA, 20 nt, Artificial Sequence
  Synthetic polynucleotide
aauauuccauccuacaguga

SEQ ID NO: 1178 - RNA, 20 nt, Artificial Sequence
  Synthetic polynucleotide
aaaaauauuccauccuacag

SEQ ID NO: 1179 - RNA, 20 nt, Artificial Sequence
  Synthetic polynucleotide
aaaucaaaaauauuccaucc

SEQ ID NO: 1180 - RNA, 20 nt, Artificial Sequence
  Synthetic polynucleotide
uuccgagugauccgucuugc

SEQ ID NO: 1181 - RNA, 20 nt, Artificial Sequence
  Synthetic polynucleotide
uccgagugauccgucuugcc

SEQ ID NO: 1182 - RNA, 20 nt, Artificial Sequence
  Synthetic polynucleotide
ccgagugauccgucuugcca

SEQ ID NO: 1183 - RNA, 20 nt, Artificial Sequence
  Synthetic polynucleotide
uuccgagugauccgucuugc

SEQ ID NO: 1184 - RNA, 20 nt, Artificial Sequence
  Synthetic polynucleotide
gauuggccgaauccuacguc

SEQ ID NO: 1185 - RNA, 20 nt, Artificial Sequence
  Synthetic polynucleotide
ccgaauccuacgucuaguca

SEQ ID NO: 1186 - RNA, 20 nt, Artificial Sequence
  Synthetic polynucleotide
cgaauccuacgucuagucaa

SEQ ID NO: 1187 - RNA, 20 nt, Artificial Sequence
  Synthetic polynucleotide
gaauccuacgucuagucaaa

SEQ ID NO: 1188 - RNA, 20 nt, Artificial Sequence
  Synthetic polynucleotide
aggauuggccgaauccuacg

SEQ ID NO: 1189 - RNA, 20 nt, Artificial Sequence
  Synthetic polynucleotide
cgaauccuacgucuagucaa

SEQ ID NO: 1190 - RNA, 20 nt, Artificial Sequence
  Synthetic polynucleotide
uuccaaauuacaaccucugc

SEQ ID NO: 1191 - RNA, 20 nt, Artificial Sequence
  Synthetic polynucleotide
aaauuacaaccucugcuggc

SEQ ID NO: 1192 - RNA, 20 nt, Artificial Sequence
  Synthetic polynucleotide
agccagcagagguuguaauu

SEQ ID NO: 1193 - RNA, 20 nt, Artificial Sequence
  Synthetic polynucleotide
caauccaucccagccagcag

SEQ ID NO: 1194 - RNA, 20 nt, Artificial Sequence
  Synthetic polynucleotide
gcaauccaucccagccagca

SEQ ID NO: 1195 - RNA, 20 nt, Artificial Sequence
  Synthetic polynucleotide
agcaauccaucccagccagc

SEQ ID NO: 1196 - RNA, 20 nt, Artificial Sequence
  Synthetic polynucleotide
ccaucccagccagcagaggu

SEQ ID NO: 1197 - RNA, 20 nt, Artificial Sequence
  Synthetic polynucleotide
agcaauccaucccagccagc

SEQ ID NO: 1198 - RNA, 20 nt, Artificial Sequence
  Synthetic polynucleotide
aaaccucauagaacaucuca

SEQ ID NO: 1199 - RNA, 20 nt, Artificial Sequence
  Synthetic polynucleotide
aaacuucucccaaaccucau

SEQ ID NO: 1200 - RNA, 20 nt, Artificial Sequence
  Synthetic polynucleotide
caaacuucucccaaaccuca

SEQ ID NO: 1201 - RNA, 20 nt, Artificial Sequence
  Synthetic polynucleotide
ccaaaccucauagaacaucu

SEQ ID NO: 1202 - RNA, 20 nt, Artificial Sequence
  Synthetic polynucleotide
ucaaacuucucccaaaccuc

SEQ ID NO: 1203 - RNA, 20 nt, Artificial Sequence
  Synthetic polynucleotide
cccgaugcgacccaguuuau

SEQ ID NO: 1204 - RNA, 20 nt, Artificial Sequence
  Synthetic polynucleotide
ccgaugcgacccaguuuaua

SEQ ID NO: 1205 - RNA, 20 nt, Artificial Sequence
  Synthetic polynucleotide
caaaguccagcucauugcca

SEQ ID NO: 1206 - RNA, 20 nt, Artificial Sequence
  Synthetic polynucleotide
aaaguccagcucauugccau

SEQ ID NO: 1207 - RNA, 20 nt, Artificial Sequence
  Synthetic polynucleotide
acaaaguccagcucauugcc

SEQ ID NO: 1208 - RNA, 20 nt, Artificial Sequence
  Synthetic polynucleotide
ucucuucguucacagaugga

SEQ ID NO: 1209 - RNA, 20 nt, Artificial Sequence
  Synthetic polynucleotide
cuucguucacagauggaaga

SEQ ID NO: 1210 - RNA, 20 nt, Artificial Sequence
  Synthetic polynucleotide
uucguucacagauggaagaa

SEQ ID NO: 1211 - RNA, 20 nt, Artificial Sequence
  Synthetic polynucleotide
ucuucguucacagauggaag

SEQ ID NO: 1212 - RNA, 20 nt, Artificial Sequence
  Synthetic polynucleotide
cuaaaacggaaacaagagga

SEQ ID NO: 1213 - RNA, 20 nt, Artificial Sequence
  Synthetic polynucleotide
acugucauucagcgugcuua

SEQ ID NO: 1214 - RNA, 20 nt, Artificial Sequence
  Synthetic polynucleotide
cugucauucagcgugcuuau

SEQ ID NO: 1215 - RNA, 20 nt, Artificial Sequence
  Synthetic polynucleotide
caaaaugucaaaaauauauc

SEQ ID NO: 1216 - RNA, 20 nt, Artificial Sequence
  Synthetic polynucleotide
accgcuuaaggcaaaauguc

SEQ ID NO: 1217 - RNA, 20 nt, Artificial Sequence
  Synthetic polynucleotide
ggcaaaaugucaaaaauaua

SEQ ID NO: 1218 - RNA, 20 nt, Artificial Sequence
  Synthetic polynucleotide
gaaauaugaacaagacagaa

SEQ ID NO: 1219 - RNA, 20 nt, Artificial Sequence
  Synthetic polynucleotide
aaauaugaacaagacagaac

SEQ ID NO: 1220 - RNA, 20 nt, Artificial Sequence
  Synthetic polynucleotide
augaacaagacagaacagaa

SEQ ID NO: 1221 - RNA, 20 nt, Artificial Sequence
  Synthetic polynucleotide
ugaacaagacagaacagaaa

SEQ ID NO: 1222 - RNA, 20 nt, Artificial Sequence
  Synthetic polynucleotide
gaacaagacagaacagaaaa

SEQ ID NO: 1223 - RNA, 20 nt, Artificial Sequence
  Synthetic polynucleotide
acaagacagaacagaaaagg

SEQ ID NO: 1224 - RNA, 20 nt, Artificial Sequence
  Synthetic polynucleotide
caagacagaacagaaaagga

SEQ ID NO: 1225 - RNA, 20 nt, Artificial Sequence
  Synthetic polynucleotide
agaaauaugaacaagacaga

SEQ ID NO: 1226 - RNA, 20 nt, Artificial Sequence
  Synthetic polynucleotide
uuacuugcaaccuagcccgc

SEQ ID NO: 1227 - RNA, 20 nt, Artificial Sequence
  Synthetic polynucleotide
aaaggcacuuacuugcaacc

SEQ ID NO: 1228 - RNA, 20 nt, Artificial Sequence
  Synthetic polynucleotide
acuuacuugcaaccuagccc

SEQ ID NO: 1229 - RNA, 20 nt, Artificial Sequence
  Synthetic polynucleotide
agaggccuggauggaaacaa

SEQ ID NO: 1230 - RNA, 20 nt, Artificial Sequence
  Synthetic polynucleotide
aagaggccuggauggaaaca

SEQ ID NO: 1231 - RNA, 20 nt, Artificial Sequence
  Synthetic polynucleotide
agaggccuggauggaaacaa

SEQ ID NO: 1232 - RNA, 20 nt, Artificial Sequence
  Synthetic polynucleotide
uaagaggccuggauggaaac

SEQ ID NO: 1233 - RNA, 20 nt, Artificial Sequence
  Synthetic polynucleotide
ccuuuuugucugcauaguag

SEQ ID NO: 1234 - RNA, 20 nt, Artificial Sequence
  Synthetic polynucleotide
accuuuuugucugcauagua

SEQ ID NO: 1235 - RNA, 20 nt, Artificial Sequence
  Synthetic polynucleotide
caccuuuuugucugcauagu

SEQ ID NO: 1236 - RNA, 20 nt, Artificial Sequence
  Synthetic polynucleotide
ucaccuuuuugucugcauag

SEQ ID NO: 1237 - RNA, 20 nt, Artificial Sequence
  Synthetic polynucleotide
aacucaccuuuuugucugca

SEQ ID NO: 1238 - RNA, 20 nt, Artificial Sequence
  Synthetic polynucleotide
caccuuuuugucugcauagu

SEQ ID NO: 1239 - RNA, 20 nt, Artificial Sequence
  Synthetic polynucleotide
uaaacucaccuuuuugucug

SEQ ID NO: 1240 - RNA, 20 nt, Artificial Sequence
  Synthetic polynucleotide
caccuuuuugucugcauagu

SEQ ID NO: 1241 - RNA, 20 nt, Artificial Sequence
  Synthetic polynucleotide
ucugcaggaggaaaaagaaa

SEQ ID NO: 1242 - RNA, 20 nt, Artificial Sequence
  Synthetic polynucleotide
gucugcaggaggaaaaagaa

SEQ ID NO: 1243 - RNA, 20 nt, Artificial Sequence
  Synthetic polynucleotide
agucugcaggaggaaaaaga

SEQ ID NO: 1244 - RNA, 20 nt, Artificial Sequence
  Synthetic polynucleotide
gaaagucugcaggaggaaaa

SEQ ID NO: 1245 - RNA, 20 nt, Artificial Sequence
  Synthetic polynucleotide
ugaaagucugcaggaggaaa

SEQ ID NO: 1246 - RNA, 20 nt, Artificial Sequence
  Synthetic polynucleotide
uacuaugaaagucugcagga

SEQ ID NO: 1247 - RNA, 20 nt, Artificial Sequence
  Synthetic polynucleotide
agucugcaggaggaaaaaga

SEQ ID NO: 1248 - RNA, 20 nt, Artificial Sequence
  Synthetic polynucleotide
augaaagucugcaggaggaa

SEQ ID NO: 1249 - RNA, 20 nt, Artificial Sequence
  Synthetic polynucleotide
cacucauauccuuuuaaaaa

SEQ ID NO: 1250 - RNA, 20 nt, Artificial Sequence
  Synthetic polynucleotide
uaguacacucauauccuuuu

SEQ ID NO: 1251 - RNA, 20 nt, Artificial Sequence
  Synthetic polynucleotide
uacacucauauccuuuuaaa

SEQ ID NO: 1252 - RNA, 20 nt, Artificial Sequence
  Synthetic polynucleotide
ugauucuaagcuaccuuauu

SEQ ID NO: 1253 - RNA, 20 nt, Artificial Sequence
  Synthetic polynucleotide
cuuacucgacauuuuugguc

SEQ ID NO: 1254 - RNA, 20 nt, Artificial Sequence
  Synthetic polynucleotide
acccacuuacucgacauuuu

SEQ ID NO: 1255 - RNA, 20 nt, Artificial Sequence
  Synthetic polynucleotide
acucgacauuuuugguccag

SEQ ID NO: 1256 - RNA, 20 nt, Artificial Sequence
  Synthetic polynucleotide
cacuuacucgacauuuuugg

SEQ ID NO: 1257 - RNA, 20 nt, Artificial Sequence
  Synthetic polynucleotide
auacccacuuacucgacauu

SEQ ID NO: 1258 - RNA, 20 nt, Artificial Sequence
  Synthetic polynucleotide
ccuaaacacaagauuccauu

SEQ ID NO: 1259 - RNA, 20 nt, Artificial Sequence
  Synthetic polynucleotide
accuaaacacaagauuccau

SEQ ID NO: 1260 - RNA, 20 nt, Artificial Sequence
  Synthetic polynucleotide
uaaaaguguaccuaaacaca

SEQ ID NO: 1261 - RNA, 20 nt, Artificial Sequence
  Synthetic polynucleotide
guaaaaguguaccuaaacac

SEQ ID NO: 1262 - RNA, 20 nt, Artificial Sequence
  Synthetic polynucleotide
accuaaacacaagauuccau

SEQ ID NO: 1263 - RNA, 20 nt, Artificial Sequence
  Synthetic polynucleotide
aguaaaaguguaccuaaaca

SEQ ID NO: 1264 - RNA, 20 nt, Artificial Sequence
  Synthetic polynucleotide
uacuuacgcaaaaacaauga

SEQ ID NO: 1265 - RNA, 20 nt, Artificial Sequence
  Synthetic polynucleotide
aaguacuuacgcaaaaacaa

SEQ ID NO: 1266 - RNA, 20 nt, Artificial Sequence
  Synthetic polynucleotide
uuacgcaaaaacaaugacga

SEQ ID NO: 1267 - RNA, 20 nt, Artificial Sequence
  Synthetic polynucleotide
gcugaaaguacuuacgcaaa

SEQ ID NO: 1268 - RNA, 20 nt, Artificial Sequence
  Synthetic polynucleotide
aauaccuguagaauuaaauc

SEQ ID NO: 1269 - RNA, 20 nt, Artificial Sequence
  Synthetic polynucleotide
aaauaccuguagaauuaaau

SEQ ID NO: 1270 - RNA, 20 nt, Artificial Sequence
  Synthetic polynucleotide
aaauaccuguagaauuaaau

SEQ ID NO: 1271 - RNA, 20 nt, Artificial Sequence
  Synthetic polynucleotide
ucuguuaaauaccuguagaa

SEQ ID NO: 1272 - RNA, 20 nt, Artificial Sequence
  Synthetic polynucleotide
uaaauaccuguagaauuaaa

SEQ ID NO: 1273 - RNA, 20 nt, Artificial Sequence
  Synthetic polynucleotide
cuuaccugggauuacagaaa

SEQ ID NO: 1274 - RNA, 20 nt, Artificial Sequence
  Synthetic polynucleotide
uacuucuuaccugggauuac

SEQ ID NO: 1275 - RNA, 20 nt, Artificial Sequence
  Synthetic polynucleotide
uuacuucuuaccugggauua

SEQ ID NO: 1276 - RNA, 20 nt, Artificial Sequence
  Synthetic polynucleotide
uucuuaccugggauuacaga

SEQ ID NO: 1277 - RNA, 20 nt, Artificial Sequence
  Synthetic polynucleotide
uacuucuuaccugggauuac

SEQ ID NO: 1278 - RNA, 20 nt, Artificial Sequence
  Synthetic polynucleotide
auuacuucuuaccugggauu

SEQ ID NO: 1279 - RNA, 20 nt, Artificial Sequence
  Synthetic polynucleotide
gccugaaaaugggagaaaaa

SEQ ID NO: 1280 - RNA, 20 nt, Artificial Sequence
  Synthetic polynucleotide
ggccugaaaaugggagaaaa

SEQ ID NO: 1281 - RNA, 20 nt, Artificial Sequence
  Synthetic polynucleotide
ucuucaggccugaaaauggg

SEQ ID NO: 1282 - RNA, 20 nt, Artificial Sequence
  Synthetic polynucleotide
gucuucaggccugaaaaugg

SEQ ID NO: 1283 - RNA, 20 nt, Artificial Sequence
  Synthetic polynucleotide
ugucuucaggccugaaaaug

SEQ ID NO: 1284 - RNA, 20 nt, Artificial Sequence
  Synthetic polynucleotide
uugucuucaggccugaaaau

SEQ ID NO: 1285 - RNA, 20 nt, Artificial Sequence
  Synthetic polynucleotide
caggccugaaaaugggagaa

SEQ ID NO: 1286 - RNA, 20 nt, Artificial Sequence
  Synthetic polynucleotide
ugucuucaggccugaaaaug

SEQ ID NO: 1287 - RNA, 20 nt, Artificial Sequence
  Synthetic polynucleotide
uugucuucaggccugaaaau

SEQ ID NO: 1288 - RNA, 20 nt, Artificial Sequence
  Synthetic polynucleotide
cuguugaagaagaauuugaa

SEQ ID NO: 1289 - RNA, 20 nt, Artificial Sequence
  Synthetic polynucleotide
uauucuguugaagaagaauu

SEQ ID NO: 1290 - RNA, 20 nt, Artificial Sequence
  Synthetic polynucleotide
uaaaaauauucuguugaaga

SEQ ID NO: 1291 - RNA, 20 nt, Artificial Sequence
  Synthetic polynucleotide
auaaaaauauucuguugaag

SEQ ID NO: 1292 - RNA, 20 nt, Artificial Sequence
  Synthetic polynucleotide
uucuguugaagaagaauuug

SEQ ID NO: 1293 - RNA, 20 nt, Artificial Sequence
  Synthetic polynucleotide
auaaaaauauucuguugaag

SEQ ID NO: 1294 - RNA, 20 nt, Artificial Sequence
  Synthetic polynucleotide
aauaaaaauauucuguugaa

SEQ ID NO: 1295 - RNA, 20 nt, Artificial Sequence
  Synthetic polynucleotide
aguaauaaaaauauucuguu

SEQ ID NO: 1296 - RNA, 20 nt, Artificial Sequence
  Synthetic polynucleotide
uacauacccugaaucugugc

SEQ ID NO: 1297 - RNA, 20 nt, Artificial Sequence
  Synthetic polynucleotide
aauauuacauacccugaauc

SEQ ID NO: 1298 - RNA, 20 nt, Artificial Sequence
  Synthetic polynucleotide
acacugacuacacacgagaa

SEQ ID NO: 1299 - RNA, 20 nt, Artificial Sequence
  Synthetic polynucleotide
gacacugacuacacacgaga

SEQ ID NO: 1300 - RNA, 20 nt, Artificial Sequence
  Synthetic polynucleotide
cuggacacugacuacacacg

SEQ ID NO: 1301 - RNA, 20 nt, Artificial Sequence
  Synthetic polynucleotide
ccuguugguaaagguuuucc

SEQ ID NO: 1302 - RNA, 20 nt, Artificial Sequence
  Synthetic polynucleotide
ugguacucaccuguugguaa

SEQ ID NO: 1303 - RNA, 20 nt, Artificial Sequence
  Synthetic polynucleotide
uugguacucaccuguuggua

SEQ ID NO: 1304 - RNA, 20 nt, Artificial Sequence
  Synthetic polynucleotide
caccuguugguaaagguuuu

SEQ ID NO: 1305 - RNA, 20 nt, Artificial Sequence
  Synthetic polynucleotide
cuugguacucaccuguuggu

SEQ ID NO: 1306 - RNA, 20 nt, Artificial Sequence
  Synthetic polynucleotide
cgcagcgucuagggaaaaau

SEQ ID NO: 1307 - RNA, 20 nt, Artificial Sequence
  Synthetic polynucleotide
acgcagcgucuagggaaaaa

SEQ ID NO: 1308 - RNA, 20 nt, Artificial Sequence
  Synthetic polynucleotide
cgcagcgucuagggaaaaau

SEQ ID NO: 1309 - RNA, 20 nt, Artificial Sequence
  Synthetic polynucleotide
gcagcacgcagcgucuaggg

SEQ ID NO: 1310 - RNA, 20 nt, Artificial Sequence
  Synthetic polynucleotide
gcaauugccugguugggcca

SEQ ID NO: 1311 - RNA, 20 nt, Artificial Sequence
  Synthetic polynucleotide
ugcaauugccugguugggcc

SEQ ID NO: 1312 - RNA, 20 nt, Artificial Sequence
  Synthetic polynucleotide
ggugguaccugauugggggu

SEQ ID NO: 1313 - RNA, 20 nt, Artificial Sequence
  Synthetic polynucleotide
gggugguaccugauuggggg

SEQ ID NO: 1314 - RNA, 20 nt, Artificial Sequence
  Synthetic polynucleotide
uuugggugguaccugauugg

SEQ ID NO: 1315 - RNA, 20 nt, Artificial Sequence
  Synthetic polynucleotide
aauuugggugguaccugauu

SEQ ID NO: 1316 - RNA, 20 nt, Artificial Sequence
  Synthetic polynucleotide
aauuugggugguaccugauu

SEQ ID NO: 1317 - RNA, 20 nt, Artificial Sequence
  Synthetic polynucleotide
augcugaguggugacugcag

SEQ ID NO: 1318 - RNA, 20 nt, Artificial Sequence
  Synthetic polynucleotide
ucuauuaucaccucuggcag

SEQ ID NO: 1319 - RNA, 20 nt, Artificial Sequence
  Synthetic polynucleotide
uaucuauuaucaccucuggc

SEQ ID NO: 1320 - RNA, 20 nt, Artificial Sequence
  Synthetic polynucleotide
cuuaucuauuaucaccucug

SEQ ID NO: 1321 - RNA, 20 nt, Artificial Sequence
  Synthetic polynucleotide
cguccuuacgcugucaucag

SEQ ID NO: 1322 - RNA, 20 nt, Artificial Sequence
  Synthetic polynucleotide
aacguccuuacgcugucauc

SEQ ID NO: 1323 - RNA, 20 nt, Artificial Sequence
  Synthetic polynucleotide
aaacguccuuacgcugucau

SEQ ID NO: 1324 - RNA, 20 nt, Artificial Sequence
  Synthetic polynucleotide
aacguccuuacgcugucauc

SEQ ID NO: 1325 - RNA, 20 nt, Artificial Sequence
  Synthetic polynucleotide
aaaacguccuuacgcuguca

SEQ ID NO: 1326 - RNA, 20 nt, Artificial Sequence
  Synthetic polynucleotide
gugcccuaaaaaaaaaauca

SEQ ID NO: 1327 - RNA, 20 nt, Artificial Sequence
  Synthetic polynucleotide
ggucgugcccuaaaaaaaaa

SEQ ID NO: 1328 - RNA, 20 nt, Artificial Sequence
  Synthetic polynucleotide
gauuggucgugcccuaaaaa

SEQ ID NO: 1329 - RNA, 20 nt, Artificial Sequence
  Synthetic polynucleotide
gauuauuacauaccuuccac

SEQ ID NO: 1330 - RNA, 20 nt, Artificial Sequence
  Synthetic polynucleotide
acauaccuuccacaguguuu

SEQ ID NO: 1331 - RNA, 20 nt, Artificial Sequence
  Synthetic polynucleotide
guucugggagaaaaaagcag

SEQ ID NO: 1332 - RNA, 20 nt, Artificial Sequence
  Synthetic polynucleotide
aguucugggagaaaaaagca

SEQ ID NO: 1333 - RNA, 20 nt, Artificial Sequence
  Synthetic polynucleotide
aaguucugggagaaaaaagc

SEQ ID NO: 1334 - RNA, 20 nt, Artificial Sequence
  Synthetic polynucleotide
caaguucugggagaaaaaag

SEQ ID NO: 1335 - RNA, 20 nt, Artificial Sequence
  Synthetic polynucleotide
ucaaguucugggagaaaaaa

SEQ ID NO: 1336 - RNA, 20 nt, Artificial Sequence
  Synthetic polynucleotide
cuucaaguucugggagaaaa

SEQ ID NO: 1337 - RNA, 20 nt, Artificial Sequence
  Synthetic polynucleotide
aaguucugggagaaaaaagc

SEQ ID NO: 1338 - RNA, 20 nt, Artificial Sequence
  Synthetic polynucleotide
cuuaccaaauuuccuauagc

SEQ ID NO: 1339 - RNA, 20 nt, Artificial Sequence
  Synthetic polynucleotide
gagacuuaccaaauuuccua

SEQ ID NO: 1340 - RNA, 20 nt, Artificial Sequence
  Synthetic polynucleotide
gacuuaccaaauuuccuaua

SEQ ID NO: 1341 - RNA, 20 nt, Artificial Sequence
  Synthetic polynucleotide
uuccaguaaagaccuaagug

SEQ ID NO: 1342 - RNA, 20 nt, Artificial Sequence
  Synthetic polynucleotide
gauuccaguaaagaccuaag

SEQ ID NO: 1343 - RNA, 20 nt, Artificial Sequence
  Synthetic polynucleotide
guaaagaccuaagugagaaa

SEQ ID NO: 1344 - RNA, 20 nt, Artificial Sequence
  Synthetic polynucleotide
ccaguaaagaccuaagugag

SEQ ID NO: 1345 - RNA, 20 nt, Artificial Sequence
  Synthetic polynucleotide
gauuccaguaaagaccuaag

SEQ ID NO: 1346 - RNA, 20 nt, Artificial Sequence
  Synthetic polynucleotide
uuaccagucugaaugaucgc

SEQ ID NO: 1347 - RNA, 20 nt, Artificial Sequence
  Synthetic polynucleotide
uuuaccagucugaaugaucg

SEQ ID NO: 1348 - RNA, 20 nt, Artificial Sequence
  Synthetic polynucleotide
uuuauguuuaccagucugaa

SEQ ID NO: 1349 - RNA, 20 nt, Artificial Sequence
  Synthetic polynucleotide
aguuuauguuuaccagucug

SEQ ID NO: 1350 - RNA, 20 nt, Artificial Sequence
  Synthetic polynucleotide
guuuaccagucugaaugauc

SEQ ID NO: 1351 - RNA, 20 nt, Artificial Sequence
  Synthetic polynucleotide
cggagcuaaaagcaaauaua

SEQ ID NO: 1352 - RNA, 20 nt, Artificial Sequence
  Synthetic polynucleotide
agcuaaaagcaaauauaaag

SEQ ID NO: 1353 - RNA, 20 nt, Artificial Sequence
  Synthetic polynucleotide
cucggagcuaaaagcaaaua

SEQ ID NO: 1354 - RNA, 20 nt, Artificial Sequence
  Synthetic polynucleotide
uugaagacucggagcuaaaa

SEQ ID NO: 1355 - RNA, 20 nt, Artificial Sequence
  Synthetic polynucleotide
caccagguuuccaaugacca

SEQ ID NO: 1356 - RNA, 20 nt, Artificial Sequence
  Synthetic polynucleotide
acauaccaccagguuuccaa

SEQ ID NO: 1357 - RNA, 20 nt, Artificial Sequence
  Synthetic polynucleotide
ugguuacauaccaccagguu

SEQ ID NO: 1358 - RNA, 20 nt, Artificial Sequence
  Synthetic polynucleotide
cuauaucaggguggggagag

SEQ ID NO: 1359 - RNA, 20 nt, Artificial Sequence
  Synthetic polynucleotide
ccuauaucaggguggggaga

SEQ ID NO: 1360 - RNA, 20 nt, Artificial Sequence
  Synthetic polynucleotide
accuauaucaggguggggag

SEQ ID NO: 1361 - RNA, 20 nt, Artificial Sequence
  Synthetic polynucleotide
gaccuauaucagggugggga

SEQ ID NO: 1362 - RNA, 20 nt, Artificial Sequence
  Synthetic polynucleotide
ggaccuauaucagggugggg

SEQ ID NO: 1363 - RNA, 20 nt, Artificial Sequence
  Synthetic polynucleotide
aggaccuauaucaggguggg

SEQ ID NO: 1364 - RNA, 20 nt, Artificial Sequence
  Synthetic polynucleotide
uaggaccuauaucagggugg

SEQ ID NO: 1365 - RNA, 20 nt, Artificial Sequence
  Synthetic polynucleotide
uuaggaccuauaucagggug

SEQ ID NO: 1366 - RNA, 20 nt, Artificial Sequence
  Synthetic polynucleotide
uuuaggaccuauaucagggu

SEQ ID NO: 1367 - RNA, 20 nt, Artificial Sequence
  Synthetic polynucleotide
guuuaggaccuauaucaggg

SEQ ID NO: 1368 - RNA, 20 nt, Artificial Sequence
  Synthetic polynucleotide
agguuuaggaccuauaucag

SEQ ID NO: 1369 - RNA, 20 nt, Artificial Sequence
  Synthetic polynucleotide
ccuauaucaggguggggaga

SEQ ID NO: 1370 - RNA, 20 nt, Artificial Sequence
  Synthetic polynucleotide
aauagguuuaggaccuauau

SEQ ID NO: 1371 - RNA, 20 nt, Artificial Sequence
  Synthetic polynucleotide
ccuauaucaggguggggaga

SEQ ID NO: 1372 - RNA, 20 nt, Artificial Sequence
  Synthetic polynucleotide
accuauaucaggguggggag

SEQ ID NO: 1373 - RNA, 20 nt, Artificial Sequence
  Synthetic polynucleotide
uuaggaccuauaucagggug

SEQ ID NO: 1374 - RNA, 20 nt, Artificial Sequence
  Synthetic polynucleotide
aggaccuauaucaggguggg

SEQ ID NO: 1375 - RNA, 20 nt, Artificial Sequence
  Synthetic polynucleotide
guuuaggaccuauaucaggg

SEQ ID NO: 1376 - RNA, 20 nt, Artificial Sequence
  Synthetic polynucleotide
uagguuuaggaccuauauca

SEQ ID NO: 1377 - RNA, 20 nt, Artificial Sequence
  Synthetic polynucleotide
ccaucugugaaacaggccuc

SEQ ID NO: 1378 - RNA, 20 nt, Artificial Sequence
  Synthetic polynucleotide
ugucuuaccaucugugaaac

SEQ ID NO: 1379 - RNA, 20 nt, Artificial Sequence
  Synthetic polynucleotide
uugucuuaccaucugugaaa

SEQ ID NO: 1380 - RNA, 20 nt, Artificial Sequence
  Synthetic polynucleotide
cauacacaaccugacaagaa

SEQ ID NO: 1381 - RNA, 20 nt, Artificial Sequence
  Synthetic polynucleotide
ccauacacaaccugacaaga

SEQ ID NO: 1382 - RNA, 20 nt, Artificial Sequence
  Synthetic polynucleotide
aaccuccauacacaaccuga

SEQ ID NO: 1383 - RNA, 20 nt, Artificial Sequence
  Synthetic polynucleotide
ccagggcaccacugcugagc

SEQ ID NO: 1384 - RNA, 20 nt, Artificial Sequence
  Synthetic polynucleotide
accagggcaccacugcugag

SEQ ID NO: 1385 - RNA, 20 nt, Artificial Sequence
  Synthetic polynucleotide
uuuaccagggcaccacugcu

SEQ ID NO: 1386 - RNA, 20 nt, Artificial Sequence
  Synthetic polynucleotide
auuuaccagggcaccacugc

SEQ ID NO: 1387 - RNA, 20 nt, Artificial Sequence
  Synthetic polynucleotide
accagggcaccacugcugag

SEQ ID NO: 1388 - RNA, 20 nt, Artificial Sequence
  Synthetic polynucleotide
agccuguggaaauaauauuc

SEQ ID NO: 1389 - RNA, 20 nt, Artificial Sequence
  Synthetic polynucleotide
aaagccuguggaaauaauau

SEQ ID NO: 1390 - RNA, 20 nt, Artificial Sequence
  Synthetic polynucleotide
uaucuucaaaagccugugga

SEQ ID NO: 1391 - RNA, 20 nt, Artificial Sequence
  Synthetic polynucleotide
acaucaacaauuaggaaauc

SEQ ID NO: 1392 - RNA, 20 nt, Artificial Sequence
  Synthetic polynucleotide
aguaccuacaucaacaauua

SEQ ID NO: 1393 - RNA, 20 nt, Artificial Sequence
  Synthetic polynucleotide
aaguaccuacaucaacaauu

SEQ ID NO: 1394 - RNA, 20 nt, Artificial Sequence
  Synthetic polynucleotide
aaaguaccuacaucaacaau

SEQ ID NO: 1395 - RNA, 20 nt, Artificial Sequence
  Synthetic polynucleotide
aguaccuacaucaacaauua

SEQ ID NO: 1396 - RNA, 20 nt, Artificial Sequence
  Synthetic polynucleotide
acccucauuccuucaaaucu

SEQ ID NO: 1397 - RNA, 20 nt, Artificial Sequence
  Synthetic polynucleotide
uacccucauuccuucaaauc

SEQ ID NO: 1398 - RNA, 20 nt, Artificial Sequence
  Synthetic polynucleotide
uuacccucauuccuucaaau

SEQ ID NO: 1399 - RNA, 20 nt, Artificial Sequence
  Synthetic polynucleotide
auuuucuuacccucauuccu

SEQ ID NO: 1400 - RNA, 20 nt, Artificial Sequence
  Synthetic polynucleotide
cuaguauucaaaagaaagaa

SEQ ID NO: 1401 - RNA, 20 nt, Artificial Sequence
  Synthetic polynucleotide
cgaccuaguauucaaaagaa

SEQ ID NO: 1402 - RNA, 20 nt, Artificial Sequence
  Synthetic polynucleotide
acgaccuaguauucaaaaga

SEQ ID NO: 1403 - RNA, 20 nt, Artificial Sequence
  Synthetic polynucleotide
acaacgaccuaguauucaaa

SEQ ID NO: 1404 - RNA, 20 nt, Artificial Sequence
  Synthetic polynucleotide
cacaacgaccuaguauucaa

SEQ ID NO: 1405 - RNA, 20 nt, Artificial Sequence
  Synthetic polynucleotide
aacgaccuaguauucaaaag

SEQ ID NO: 1406 - RNA, 20 nt, Artificial Sequence
  Synthetic polynucleotide
ucacaacgaccuaguauuca

SEQ ID NO: 1407 - RNA, 20 nt, Artificial Sequence
  Synthetic polynucleotide
uuacaacuugaagcagagau

SEQ ID NO: 1408 - RNA, 20 nt, Artificial Sequence
  Synthetic polynucleotide
cuuacaacuugaagcagaga

SEQ ID NO: 1409 - RNA, 20 nt, Artificial Sequence
  Synthetic polynucleotide
acacuuacaacuugaagcag

SEQ ID NO: 1410 - RNA, 20 nt, Artificial Sequence
  Synthetic polynucleotide
gacacuuacaacuugaagca

SEQ ID NO: 1411 - RNA, 20 nt, Artificial Sequence
  Synthetic polynucleotide
ggacacuuacaacuugaagc

SEQ ID NO: 1412 - RNA, 20 nt, Artificial Sequence
  Synthetic polynucleotide
gggacacuuacaacuugaag

SEQ ID NO: 1413 - RNA, 20 nt, Artificial Sequence
  Synthetic polynucleotide
acuuacaacuugaagcagag

SEQ ID NO: 1414 - RNA, 20 nt, Artificial Sequence
  Synthetic polynucleotide
ggacacuuacaacuugaagc

SEQ ID NO: 1415 - RNA, 20 nt, Artificial Sequence
  Synthetic polynucleotide
ccuuuaagaauaacauuaau

SEQ ID NO: 1416 - RNA, 20 nt, Artificial Sequence
  Synthetic polynucleotide
gccuuuaagaauaacauuaa

SEQ ID NO: 1417 - RNA, 20 nt, Artificial Sequence
  Synthetic polynucleotide
gccuuuaagaauaacauuaa

SEQ ID NO: 1418 - RNA, 20 nt, Artificial Sequence
  Synthetic polynucleotide
aaguugccuuuaagaauaac

SEQ ID NO: 1419 - RNA, 20 nt, Artificial Sequence
  Synthetic polynucleotide
ugccuuuaagaauaacauua

SEQ ID NO: 1420 - RNA, 20 nt, Artificial Sequence
  Synthetic polynucleotide
auaaucaauacuuacauuaa

SEQ ID NO: 1421 - RNA, 20 nt, Artificial Sequence
  Synthetic polynucleotide
gauaaucaauacuuacauua

SEQ ID NO: 1422 - RNA, 20 nt, Artificial Sequence
  Synthetic polynucleotide
ccuauaaaauuuacaaaagu

SEQ ID NO: 1423 - RNA, 20 nt, Artificial Sequence
  Synthetic polynucleotide
ucuaccuauaaaauuuacaa

SEQ ID NO: 1424 - RNA, 20 nt, Artificial Sequence
  Synthetic polynucleotide
ugucuaccuauaaaauuuac

SEQ ID NO: 1425 - RNA, 20 nt, Artificial Sequence
  Synthetic polynucleotide
uaucuucuuuuucuguuggu

SEQ ID NO: 1426 - RNA, 20 nt, Artificial Sequence
  Synthetic polynucleotide
uacuuaucuucuuuuucugu

SEQ ID NO: 1427 - RNA, 20 nt, Artificial Sequence
  Synthetic polynucleotide
uaucuucuuuuucuguuggu

SEQ ID NO: 1428 - RNA, 20 nt, Artificial Sequence
  Synthetic polynucleotide
aauacuuaucuucuuuuucu

SEQ ID NO: 1429 - RNA, 20 nt, Artificial Sequence
  Synthetic polynucleotide
uuuaccccuggucgaggaau

SEQ ID NO: 1430 - RNA, 20 nt, Artificial Sequence
  Synthetic polynucleotide
auuuuuuuaccccuggucga

SEQ ID NO: 1431 - RNA, 20 nt, Artificial Sequence
  Synthetic polynucleotide
uauuuuuuuaccccuggucg

SEQ ID NO: 1432 - RNA, 20 nt, Artificial Sequence
  Synthetic polynucleotide
auauuuuuuuaccccugguc

SEQ ID NO: 1433 - RNA, 20 nt, Artificial Sequence
  Synthetic polynucleotide
uauauuuuuuuaccccuggu

SEQ ID NO: 1434 - RNA, 20 nt, Artificial Sequence
  Synthetic polynucleotide
uauuuuuuuaccccuggucg

SEQ ID NO: 1435 - RNA, 20 nt, Artificial Sequence
  Synthetic polynucleotide
uuuuguucugcaaagaaaua

SEQ ID NO: 1436 - RNA, 20 nt, Artificial Sequence
  Synthetic polynucleotide
auuuuguucugcaaagaaau

SEQ ID NO: 1437 - RNA, 20 nt, Artificial Sequence
  Synthetic polynucleotide
uuguucugcaaagaaauaag

SEQ ID NO: 1438 - RNA, 20 nt, Artificial Sequence
  Synthetic polynucleotide
auuuuguucugcaaagaaau

SEQ ID NO: 1439 - RNA, 20 nt, Artificial Sequence
  Synthetic polynucleotide
ccuuggauuuuguucugcaa

SEQ ID NO: 1440 - RNA, 20 nt, Artificial Sequence
  Synthetic polynucleotide
gauuuuguucugcaaagaaa

SEQ ID NO: 1441 - RNA, 20 nt, Artificial Sequence
  Synthetic polynucleotide
aauauucuuaccuacaaugg

SEQ ID NO: 1442 - RNA, 20 nt, Artificial Sequence
  Synthetic polynucleotide
aaauauucuuaccuacaaug

SEQ ID NO: 1443 - RNA, 20 nt, Artificial Sequence
  Synthetic polynucleotide
uaaauauucuuaccuacaau

SEQ ID NO: 1444 - RNA, 20 nt, Artificial Sequence
  Synthetic polynucleotide
auauucuuaccuacaaugga

SEQ ID NO: 1445 - RNA, 20 nt, Artificial Sequence
  Synthetic polynucleotide
uaaauauucuuaccuacaau

SEQ ID NO: 1446 - RNA, 20 nt, Artificial Sequence
  Synthetic polynucleotide
auaaauauucuuaccuacaa

SEQ ID NO: 1447 - RNA, 20 nt, Artificial Sequence
  Synthetic polynucleotide
cuguauguggaggaaaauaa

SEQ ID NO: 1448 - RNA, 20 nt, Artificial Sequence
  Synthetic polynucleotide
gaaacauaccuguaugugga

SEQ ID NO: 1449 - RNA, 20 nt, Artificial Sequence
  Synthetic polynucleotide
agaaacauaccuguaugugg

SEQ ID NO: 1450 - RNA, 20 nt, Artificial Sequence
  Synthetic polynucleotide
uagaaacauaccuguaugug

SEQ ID NO: 1451 - RNA, 20 nt, Artificial Sequence
  Synthetic polynucleotide
cuagaaacauaccuguaugu

SEQ ID NO: 1452 - RNA, 20 nt, Artificial Sequence
  Synthetic polynucleotide
cauaccuguauguggaggaa

SEQ ID NO: 1453 - RNA, 20 nt, Artificial Sequence
  Synthetic polynucleotide
aaacauaccuguauguggag

SEQ ID NO: 1454 - RNA, 20 nt, Artificial Sequence
  Synthetic polynucleotide
ccuguauguggaggaaaaua

SEQ ID NO: 1455 - RNA, 20 nt, Artificial Sequence
  Synthetic polynucleotide
gcuagaaacauaccuguaug

SEQ ID NO: 1456 - RNA, 20 nt, Artificial Sequence
  Synthetic polynucleotide
cuagaaacauaccuguaugu

SEQ ID NO: 1457 - RNA, 15 nt, Artificial Sequence
  Synthetic polynucleotide
cagggcaagaaggcc

SEQ ID NO: 1458 - RNA, 13 nt, Artificial Sequence
  Synthetic polynucleotide
cgccaccaggccc

SEQ ID NO: 1459 - RNA, 18 nt, Artificial Sequence
  Synthetic polynucleotide
cagcagacaaaaagggag

SEQ ID NO: 1460 - RNA, 13 nt, Artificial Sequence
  Synthetic polynucleotide
cccccgcagacca

SEQ ID NO: 1461 - RNA, 16 nt, Artificial Sequence
  Synthetic polynucleotide
agacaccaaccaaaaa

SEQ ID NO: 1462 - RNA, 14 nt, Artificial Sequence
  Synthetic polynucleotide
gacaagcaccacag

SEQ ID NO: 1463 - RNA, 18 nt, Artificial Sequence
  Synthetic polynucleotide
ccaaaaagcgagaagggg

SEQ ID NO: 1464 - RNA, 12 nt, Artificial Sequence
  Synthetic polynucleotide
acggaggacaca

SEQ ID NO: 1465 - RNA, 14 nt, Artificial Sequence
  Synthetic polynucleotide
aggcgaagaccagc

SEQ ID NO: 1466 - RNA, 16 nt, Artificial Sequence
  Synthetic polynucleotide
aaacacaggaaacaga

SEQ ID NO: 1467 - RNA, 18 nt, Artificial Sequence
  Synthetic polynucleotide
cgaacccaggaagaagaa

SEQ ID NO: 1468 - RNA, 17 nt, Artificial Sequence
  Synthetic polynucleotide
ccccacaggccgaagac

SEQ ID NO: 1469 - RNA, 12 nt, Artificial Sequence
  Synthetic polynucleotide
cccaacagaaaa

SEQ ID NO: 1470 - RNA, 16 nt, Artificial Sequence
  Synthetic polynucleotide
cacagacagggagaaa

SEQ ID NO: 1471 - RNA, 13 nt, Artificial Sequence
  Synthetic polynucleotide
cccgggagcaggc

SEQ ID NO: 1472 - RNA, 18 nt, Artificial Sequence
  Synthetic polynucleotide
caccaacagggagaccaa

SEQ ID NO: 1473 - RNA, 15 nt, Artificial Sequence
  Synthetic polynucleotide
ccacccagacgcgcg

SEQ ID NO: 1474 - RNA, 19 nt, Artificial Sequence
  Synthetic polynucleotide
cggcccaaccaggcaagca

SEQ ID NO: 1475 - RNA, 21 nt, Artificial Sequence
  Synthetic polynucleotide
cccccaacaggaccacccaaa

SEQ ID NO: 1476 - RNA, 17 nt, Artificial Sequence
  Synthetic polynucleotide
acgcagcaccaccagca

SEQ ID NO: 1477 - RNA, 17 nt, Artificial Sequence
  Synthetic polynucleotide
cgccagagggaaaagaa

SEQ ID NO: 1478 - RNA, 17 nt, Artificial Sequence
  Synthetic polynucleotide
cgagacagcgaaggacg

SEQ ID NO: 1479 - RNA, 14 nt, Artificial Sequence
  Synthetic polynucleotide
agaagggcacgacc

SEQ ID NO: 1480 - RNA, 17 nt, Artificial Sequence
  Synthetic polynucleotide
cacgggaaggagaaaac

SEQ ID NO: 1481 - RNA, 14 nt, Artificial Sequence
  Synthetic polynucleotide
cccccagaacgaag

SEQ ID NO: 1482 - RNA, 15 nt, Artificial Sequence
  Synthetic polynucleotide
caaggaaaggaagcc

SEQ ID NO: 1483 - RNA, 13 nt, Artificial Sequence
  Synthetic polynucleotide
accacaggcacgg

SEQ ID NO: 1484 - RNA, 18 nt, Artificial Sequence
  Synthetic polynucleotide
acacagacggaaacaaaa

SEQ ID NO: 1485 - RNA, 14 nt, Artificial Sequence
  Synthetic polynucleotide
acaagcagcccgag

SEQ ID NO: 1486 - RNA, 19 nt, Artificial Sequence
  Synthetic polynucleotide
aggaaaccggggagaacca

SEQ ID NO: 1487 - RNA, 18 nt, Artificial Sequence
  Synthetic polynucleotide
ccacccgaaaggccaaac

SEQ ID NO: 1488 - RNA, 17 nt, Artificial Sequence
  Synthetic polynucleotide
cgcacagaggaagacaa

SEQ ID NO: 1489 - RNA, 12 nt, Artificial Sequence
  Synthetic polynucleotide
gccgcaggggag

SEQ ID NO: 1490 - RNA, 18 nt, Artificial Sequence
  Synthetic polynucleotide
ccagcaggggcccggaaa

SEQ ID NO: 1491 - RNA, 16 nt, Artificial Sequence
  Synthetic polynucleotide
aaccacaggcgaagaa

SEQ ID NO: 1492 - RNA, 13 nt, Artificial Sequence
  Synthetic polynucleotide
ccaaggagaggac

SEQ ID NO: 1493 - RNA, 20 nt, Artificial Sequence
  Synthetic polynucleotide
agaaggaagagggaagaaaa

SEQ ID NO: 1494 - RNA, 13 nt, Artificial Sequence
  Synthetic polynucleotide
cgaaacaggcggg

SEQ ID NO: 1495 - RNA, 15 nt, Artificial Sequence
  Synthetic polynucleotide
cgccaaggaaggccc

SEQ ID NO: 1496 - RNA, 15 nt, Artificial Sequence
  Synthetic polynucleotide
aaagacaaaggcaac

SEQ ID NO: 1497 - RNA, 13 nt, Artificial Sequence
  Synthetic polynucleotide
acgaagaagagaa

SEQ ID NO: 1498 - RNA, 15 nt, Artificial Sequence
  Synthetic polynucleotide
acgaaaaaggagaca

SEQ ID NO: 1499 - RNA, 22 nt, Artificial Sequence
  Synthetic polynucleotide
accaacagaaaaagaagaaaga

SEQ ID NO: 1500 - RNA, 20 nt, Artificial Sequence
  Synthetic polynucleotide
ccgaccaggggaaaaaaaaa

SEQ ID NO: 1501 - RNA, 14 nt, Artificial Sequence
  Synthetic polynucleotide
cacgcagaacaaaa

SEQ ID NO: 1502 - RNA, 14 nt, Artificial Sequence
  Synthetic polynucleotide
cccagaggaagaaa

SEQ ID NO: 1503 - RNA, 16 nt, Artificial Sequence
  Synthetic polynucleotide
cccacaacaggagcag

SEQ ID NO: 1504 - RNA, 20 nt, Artificial Sequence
  Synthetic polynucleotide
caaccucagacagagagcaa

SEQ ID NO: 1505 - RNA, 20 nt, Artificial Sequence
  Synthetic polynucleotide
gaucccaaccucagacagag

SEQ ID NO: 1506 - RNA, 20 nt, Artificial Sequence
  Synthetic polynucleotide
aaauccagccaacaccaggc

SEQ ID NO: 1507 - RNA, 20 nt, Artificial Sequence
  Synthetic polynucleotide
cguguguagucaguguccag

SEQ ID NO: 1508 - RNA, 20 nt, Artificial Sequence
  Synthetic polynucleotide
cguguguagucaguguccag

SEQ ID NO: 1509 - RNA, 20 nt, Artificial Sequence
  Synthetic polynucleotide
guuccacgggucacgaagaa

SEQ ID NO: 1510 - RNA, 20 nt, Artificial Sequence
  Synthetic polynucleotide
aaagccaauuccucgaccag

SEQ ID NO: 1511 - RNA, 20 nt, Artificial Sequence
  Synthetic polynucleotide
ucaguucugcgaucauucag

SEQ ID NO: 1512 - RNA, 20 nt, Artificial Sequence
  Synthetic polynucleotide
gcuccgagucuucaaguugg

SEQ ID NO: 1513 - RNA, 20 nt, Artificial Sequence
  Synthetic polynucleotide
aaucaaaagaagcucuccag

SEQ ID NO: 1514 - RNA, 20 nt, Artificial Sequence
  Synthetic polynucleotide
aauggacagcuucugccaga

SEQ ID NO: 1515 - RNA, 20 nt, Artificial Sequence
  Synthetic polynucleotide
gaauuuuauccaauauggag

SEQ ID NO: 1516 - RNA, 20 nt, Artificial Sequence
  Synthetic polynucleotide
ucuucguucacagauggaag

SEQ ID NO: 1517 - RNA, 20 nt, Artificial Sequence
  Synthetic polynucleotide
guuugugccccacagacccc

SEQ ID NO: 1518 - RNA, 20 nt, Artificial Sequence
  Synthetic polynucleotide
acauuuuugguccaguccgg

SEQ ID NO: 1519 - RNA, 20 nt, Artificial Sequence
  Synthetic polynucleotide
auaggcgagcacaugaaaag

SEQ ID NO: 1520 - RNA, 20 nt, Artificial Sequence
  Synthetic polynucleotide
uacccccaaucagguaccac

SEQ ID NO: 1521 - RNA, 20 nt, Artificial Sequence
  Synthetic polynucleotide
gcaaaucuguaccaccaagg

SEQ ID NO: 1522 - RNA, 20 nt, Artificial Sequence
  Synthetic polynucleotide
aaaagccaauuccucgacca

SEQ ID NO: 1523 - RNA, 20 nt, Artificial Sequence
  Synthetic polynucleotide
uccacgggucacgaagaaaa

SEQ ID NO: 1524 - RNA, 20 nt, Artificial Sequence
  Synthetic polynucleotide
cagccaacaccaggcauugg

SEQ ID NO: 1525 - RNA, 20 nt, Artificial Sequence
  Synthetic polynucleotide
caguuccacgggucacgaag

SEQ ID NO: 1526 - RNA, 20 nt, Artificial Sequence
  Synthetic polynucleotide
cacagaccccaggagcgacg

SEQ ID NO: 1527 - RNA, 20 nt, Artificial Sequence
  Synthetic polynucleotide
uaugugaaacaaaccuuacg

SEQ ID NO: 1528 - RNA, 20 nt, Artificial Sequence
  Synthetic polynucleotide
aaaaauauuccauccuacag

SEQ ID NO: 1529 - RNA, 20 nt, Artificial Sequence
  Synthetic polynucleotide
uuaccaacaggugaguacca

SEQ ID NO: 1530 - RNA, 20 nt, Artificial Sequence
  Synthetic polynucleotide
uuaccaacaggugaguacca

SEQ ID NO: 1531 - RNA, 20 nt, Artificial Sequence
  Synthetic polynucleotide
gccaguuccacgggucacga

SEQ ID NO: 1532 - RNA, 20 nt, Artificial Sequence
  Synthetic polynucleotide
gacauuuuugguccaguccg

SEQ ID NO: 1533 - RNA, 20 nt, Artificial Sequence
  Synthetic polynucleotide
ucagccagaauauaagacac

SEQ ID NO: 1534 - RNA, 20 nt, Artificial Sequence
  Synthetic polynucleotide
caugugccaccgugggagcg

SEQ ID NO: 1535 - RNA, 20 nt, Artificial Sequence
  Synthetic polynucleotide
aucagguaccacccaaauug

SEQ ID NO: 1536 - RNA, 20 nt, Artificial Sequence
  Synthetic polynucleotide
uuaugugaaacaaaccuuac

SEQ ID NO: 1537 - RNA, 20 nt, Artificial Sequence
  Synthetic polynucleotide
accgcuuaaggcaaaauguc

SEQ ID NO: 1538 - RNA, 20 nt, Artificial Sequence
  Synthetic polynucleotide
ggcacgaccaaucaaauaca

SEQ ID NO: 1539 - RNA, 20 nt, Artificial Sequence
  Synthetic polynucleotide
aaugugcgauggaaaaaccu

SEQ ID NO: 1540 - RNA, 20 nt, Artificial Sequence
  Synthetic polynucleotide
cgaauccuacgucuagucaa

SEQ ID NO: 1541 - RNA, 20 nt, Artificial Sequence
  Synthetic polynucleotide
aaacagcugcccuucaucua

SEQ ID NO: 1542 - RNA, 20 nt, Artificial Sequence
  Synthetic polynucleotide
ccagacaaaaauguccaccu

SEQ ID NO: 1543 - RNA, 20 nt, Artificial Sequence
  Synthetic polynucleotide
cauugaacaacgcauugcug

SEQ ID NO: 1544 - RNA, 20 nt, Artificial Sequence
  Synthetic polynucleotide
agaaauaugaacaagacaga

SEQ ID NO: 1545 - RNA, 20 nt, Artificial Sequence
  Synthetic polynucleotide
ggggcuuugauccagucagu

SEQ ID NO: 1546 - RNA, 20 nt, Artificial Sequence
  Synthetic polynucleotide
acagaccccaggagcgacgc

SEQ ID NO: 1547 - RNA, 20 nt, Artificial Sequence
  Synthetic polynucleotide
gagcgacgcagcaguaacau

SEQ ID NO: 1548 - RNA, 20 nt, Artificial Sequence
  Synthetic polynucleotide
cgaauccuacgucuagucaa

SEQ ID NO: 1549 - RNA, 20 nt, Artificial Sequence
  Synthetic polynucleotide
gaauccuacgucuagucaaa

SEQ ID NO: 1550 - RNA, 20 nt, Artificial Sequence
  Synthetic polynucleotide
gcacgaccaaucaaauacac

SEQ ID NO: 1551 - RNA, 20 nt, Artificial Sequence
  Synthetic polynucleotide
ggucaaagucaacauaugac

SEQ ID NO: 1552 - RNA, 20 nt, Artificial Sequence
  Synthetic polynucleotide
guaacaucagccaagccagu

SEQ ID NO: 1553 - RNA, 20 nt, Artificial Sequence
  Synthetic polynucleotide
accuccauacacaaccugac

SEQ ID NO: 1554 - RNA, 20 nt, Artificial Sequence
  Synthetic polynucleotide
auguuagucaaaaugugcga

SEQ ID NO: 1555 - RNA, 20 nt, Artificial Sequence
  Synthetic polynucleotide
ccaaaccucauagaacaucu

SEQ ID NO: 1556 - RNA, 20 nt, Artificial Sequence
  Synthetic polynucleotide
guuuucgaaauucacuugaa

SEQ ID NO: 1557 - RNA, 20 nt, Artificial Sequence
  Synthetic polynucleotide
agccaagccaguaggucccc

SEQ ID NO: 1558 - RNA, 20 nt, Artificial Sequence
  Synthetic polynucleotide
caauggacagcuucugccag

SEQ ID NO: 1559 - RNA, 20 nt, Artificial Sequence
  Synthetic polynucleotide
cauuuuugguccaguccggu

SEQ ID NO: 1560 - RNA, 20 nt, Artificial Sequence
  Synthetic polynucleotide
cagccaguuccacgggucac

SEQ ID NO: 1561 - RNA, 20 nt, Artificial Sequence
  Synthetic polynucleotide
ccaaccucagacagagagca

SEQ ID NO: 1562 - RNA, 20 nt, Artificial Sequence
  Synthetic polynucleotide
aagucaaguuccaaaucguu

SEQ ID NO: 1563 - RNA, 20 nt, Artificial Sequence
  Synthetic polynucleotide
uguuagucaaaaugugcgau

SEQ ID NO: 1564 - RNA, 20 nt, Artificial Sequence
  Synthetic polynucleotide
accuagugacaaaucaagcc

SEQ ID NO: 1565 - RNA, 20 nt, Artificial Sequence
  Synthetic polynucleotide
aauuccucgaccagggguaa

SEQ ID NO: 1566 - RNA, 20 nt, Artificial Sequence
  Synthetic polynucleotide
cccaauggacagcuucugcc

SEQ ID NO: 1567 - RNA, 20 nt, Artificial Sequence
  Synthetic polynucleotide
caaccuccagauugcaguga

SEQ ID NO: 1568 - RNA, 20 nt, Artificial Sequence
  Synthetic polynucleotide
cucaugcugccaaguuaaca

SEQ ID NO: 1569 - RNA, 20 nt, Artificial Sequence
  Synthetic polynucleotide
auaauaaucguccaucccuu

SEQ ID NO: 1570 - RNA, 20 nt, Artificial Sequence
  Synthetic polynucleotide
acagcugcccuucaucuaug

SEQ ID NO: 1571 - RNA, 20 nt, Artificial Sequence
  Synthetic polynucleotide
ggcauaggcgagcacaugaa

SEQ ID NO: 1572 - RNA, 20 nt, Artificial Sequence
  Synthetic polynucleotide
cugcaaggcgaagcagcaga

SEQ ID NO: 1573 - RNA, 20 nt, Artificial Sequence
  Synthetic polynucleotide
ccaaucaaauacacaagaaa

SEQ ID NO: 1574 - RNA, 20 nt, Artificial Sequence
  Synthetic polynucleotide
ccaucccagccagcagaggu

SEQ ID NO: 1575 - RNA, 20 nt, Artificial Sequence
  Synthetic polynucleotide
gcauaggcgagcacaugaaa

SEQ ID NO: 1576 - RNA, 20 nt, Artificial Sequence
  Synthetic polynucleotide
aguucugcgaucauucagac

SEQ ID NO: 1577 - RNA, 20 nt, Artificial Sequence
  Synthetic polynucleotide
gaagcagcagaacaagucuu

SEQ ID NO: 1578 - RNA, 20 nt, Artificial Sequence
  Synthetic polynucleotide
gcuaaugacccaagauuacu

SEQ ID NO: 1579 - RNA, 20 nt, Artificial Sequence
  Synthetic polynucleotide
ggacagcuucugccagaggu

SEQ ID NO: 1580 - RNA, 20 nt, Artificial Sequence
  Synthetic polynucleotide
gugcgauggaaaaaccugaa

SEQ ID NO: 1581 - RNA, 20 nt, Artificial Sequence
  Synthetic polynucleotide
aauauuccauccuacaguga

SEQ ID NO: 1582 - RNA, 20 nt, Artificial Sequence
  Synthetic polynucleotide
uugaacaacgcauugcugaa

SEQ ID NO: 1583 - RNA, 20 nt, Artificial Sequence
  Synthetic polynucleotide
uuaccaacaggugaguacca

SEQ ID NO: 1584 - RNA, 20 nt, Artificial Sequence
  Synthetic polynucleotide
uuaccaacaggugaguacca

SEQ ID NO: 1585 - RNA, 20 nt, Artificial Sequence
  Synthetic polynucleotide
ggaggucgcuggucaagcua

SEQ ID NO: 1586 - RNA, 20 nt, Artificial Sequence
  Synthetic polynucleotide
gccaaguuaacauagaguca

SEQ ID NO: 1587 - RNA, 20 nt, Artificial Sequence
  Synthetic polynucleotide
aaccuccagauugcagugac

SEQ ID NO: 1588 - RNA, 20 nt, Artificial Sequence
  Synthetic polynucleotide
auuccauccuacagugaagu

SEQ ID NO: 1589 - RNA, 20 nt, Artificial Sequence
  Synthetic polynucleotide
gacaaaaauguccaccuugg

SEQ ID NO: 1590 - RNA, 20 nt, Artificial Sequence
  Synthetic polynucleotide
guccagacaaaaauguccac

SEQ ID NO: 1591 - RNA, 20 nt, Artificial Sequence
  Synthetic polynucleotide
uccagaucaagaauuugugu

SEQ ID NO: 1592 - RNA, 20 nt, Artificial Sequence
  Synthetic polynucleotide
augaguauuuccaaguaggc

SEQ ID NO: 1593 - RNA, 20 nt, Artificial Sequence
  Synthetic polynucleotide
caaaagaagcucuccagugg

SEQ ID NO: 1594 - RNA, 20 nt, Artificial Sequence
  Synthetic polynucleotide
auaaccauaugcuauccauu

SEQ ID NO: 1595 - RNA, 20 nt, Artificial Sequence
  Synthetic polynucleotide
auccaaggauguauauuuga

SEQ ID NO: 1596 - RNA, 20 nt, Artificial Sequence
  Synthetic polynucleotide
agucaaguuccaaaucguuc

SEQ ID NO: 1597 - RNA, 20 nt, Artificial Sequence
  Synthetic polynucleotide
aaacagcugcccuucaucua

SEQ ID NO: 1598 - RNA, 20 nt, Artificial Sequence
  Synthetic polynucleotide
uuuaccaacaggugaguacc

SEQ ID NO: 1599 - RNA, 20 nt, Artificial Sequence
  Synthetic polynucleotide
aaggcaacuuuuaagggaug

SEQ ID NO: 1600 - RNA, 20 nt, Artificial Sequence
  Synthetic polynucleotide
ugacaaaucaagccuuugau

SEQ ID NO: 1601 - RNA, 20 nt, Artificial Sequence
  Synthetic polynucleotide
agcuucugccagaggugaua

SEQ ID NO: 1602 - RNA, 20 nt, Artificial Sequence
  Synthetic polynucleotide
ugaacaacgcauugcugaaa

SEQ ID NO: 1603 - RNA, 20 nt, Artificial Sequence
  Synthetic polynucleotide
uaccaacaggugaguaccaa

SEQ ID NO: 1604 - RNA, 20 nt, Artificial Sequence
  Synthetic polynucleotide
uaccaacaggugaguaccaa

SEQ ID NO: 1605 - RNA, 20 nt, Artificial Sequence
  Synthetic polynucleotide
cguucaugugccaccguggg

SEQ ID NO: 1606 - RNA, 20 nt, Artificial Sequence
  Synthetic polynucleotide
aaccuccauacacaaccuga

SEQ ID NO: 1607 - RNA, 20 nt, Artificial Sequence
  Synthetic polynucleotide
uauccauuuuagaagcauuu

SEQ ID NO: 1608 - RNA, 20 nt, Artificial Sequence
  Synthetic polynucleotide
caucccuuaaaaguugccuu

SEQ ID NO: 1609 - RNA, 20 nt, Artificial Sequence
  Synthetic polynucleotide
acaaaagccaauuccucgac

SEQ ID NO: 1610 - RNA, 20 nt, Artificial Sequence
  Synthetic polynucleotide
caaaagccaauuccucgacc

SEQ ID NO: 1611 - RNA, 20 nt, Artificial Sequence
  Synthetic polynucleotide
auugaacaacgcauugcuga

SEQ ID NO: 1612 - RNA, 20 nt, Artificial Sequence
  Synthetic polynucleotide
gauaauuucaaccaacagaa

SEQ ID NO: 1613 - RNA, 20 nt, Artificial Sequence
  Synthetic polynucleotide
uccagucagugaagaagcuu

SEQ ID NO: 1614 - RNA, 20 nt, Artificial Sequence
  Synthetic polynucleotide
aacagaaccaggcaaacauu

SEQ ID NO: 1615 - RNA, 20 nt, Artificial Sequence
  Synthetic polynucleotide
caauggacagcuucugccag

SEQ ID NO: 1616 - RNA, 20 nt, Artificial Sequence
  Synthetic polynucleotide
ccagacaaaaauguccaccu

SEQ ID NO: 1617 - RNA, 20 nt, Artificial Sequence
  Synthetic polynucleotide
cagacaaaaauguccaccuu

SEQ ID NO: 1618 - RNA, 20 nt, Artificial Sequence
  Synthetic polynucleotide
uuagcuccgagucuucaagu

SEQ ID NO: 1619 - RNA, 20 nt, Artificial Sequence
  Synthetic polynucleotide
uucguucacagauggaagaa

SEQ ID NO: 1620 - RNA, 20 nt, Artificial Sequence
  Synthetic polynucleotide
ccaguccgguggguuauuca

SEQ ID NO: 1621 - RNA, 20 nt, Artificial Sequence
  Synthetic polynucleotide
gcauaggcgagcacaugaaa

SEQ ID NO: 1622 - RNA, 20 nt, Artificial Sequence
  Synthetic polynucleotide
gaggucaagacaucuuuaug

SEQ ID NO: 1623 - RNA, 20 nt, Artificial Sequence
  Synthetic polynucleotide
ccauccuacagugaaguagu

SEQ ID NO: 1624 - RNA, 20 nt, Artificial Sequence
  Synthetic polynucleotide
agauaagacaagcagaagau

SEQ ID NO: 1625 - RNA, 20 nt, Artificial Sequence
  Synthetic polynucleotide
gugauggucaaucauuuauu

SEQ ID NO: 1626 - RNA, 20 nt, Artificial Sequence
  Synthetic polynucleotide
aacagcugcccuucaucuau

SEQ ID NO: 1627 - RNA, 20 nt, Artificial Sequence
  Synthetic polynucleotide
guccaguccgguggguuauu

SEQ ID NO: 1628 - RNA, 20 nt, Artificial Sequence
  Synthetic polynucleotide
uguguagucaguguccagag

SEQ ID NO: 1629 - RNA, 20 nt, Artificial Sequence
  Synthetic polynucleotide
aucaaaagaagcucuccagu

SEQ ID NO: 1630 - RNA, 20 nt, Artificial Sequence
  Synthetic polynucleotide
ugccaaguuaacauagaguc

SEQ ID NO: 1631 - RNA, 20 nt, Artificial Sequence
  Synthetic polynucleotide
cuagugacaaaucaagccuu

SEQ ID NO: 1632 - RNA, 20 nt, Artificial Sequence
  Synthetic polynucleotide
ucaugcugccaaguuaacau

SEQ ID NO: 1633 - RNA, 20 nt, Artificial Sequence
  Synthetic polynucleotide
augaguauuuccaaguaggc

SEQ ID NO: 1634 - RNA, 20 nt, Artificial Sequence
  Synthetic polynucleotide
ggcuaaugacccaagauuac

SEQ ID NO: 1635 - RNA, 20 nt, Artificial Sequence
  Synthetic polynucleotide
cucguguguagucagugucc

SEQ ID NO: 1636 - RNA, 20 nt, Artificial Sequence
  Synthetic polynucleotide
auccaauauggagagcaauu

SEQ ID NO: 1637 - RNA, 20 nt, Artificial Sequence
  Synthetic polynucleotide
uucgaacuuucagaguauug

SEQ ID NO: 1638 - RNA, 20 nt, Artificial Sequence
  Synthetic polynucleotide
acagcuguucaugggaaacc

SEQ ID NO: 1639 - RNA, 20 nt, Artificial Sequence
  Synthetic polynucleotide
ucagacagagagcaaugagu

SEQ ID NO: 1640 - RNA, 20 nt, Artificial Sequence
  Synthetic polynucleotide
agucguucaugugccaccgu

SEQ ID NO: 1641 - RNA, 20 nt, Artificial Sequence
  Synthetic polynucleotide
aagguuuucccaguaaucuu

SEQ ID NO: 1642 - RNA, 20 nt, Artificial Sequence
  Synthetic polynucleotide
uaaaggcaacuuuuaaggga

SEQ ID NO: 1643 - RNA, 20 nt, Artificial Sequence
  Synthetic polynucleotide
ugugccaccgugggagcgua

SEQ ID NO: 1644 - RNA, 20 nt, Artificial Sequence
  Synthetic polynucleotide
uugaauuuuauccaauaugg

SEQ ID NO: 1645 - RNA, 20 nt, Artificial Sequence
  Synthetic polynucleotide
caaaaauauuccagccuacu

SEQ ID NO: 1646 - RNA, 20 nt, Artificial Sequence
  Synthetic polynucleotide
gauaagacaagcagaagauc

SEQ ID NO: 1647 - RNA, 20 nt, Artificial Sequence
  Synthetic polynucleotide
ucuucgaacuuucagaguau

SEQ ID NO: 1648 - RNA, 20 nt, Artificial Sequence
  Synthetic polynucleotide
ggacacugacuacacacgag

SEQ ID NO: 1649 - RNA, 20 nt, Artificial Sequence
  Synthetic polynucleotide
ccaaugcugccggugaacgg

SEQ ID NO: 1650 - RNA, 20 nt, Artificial Sequence
  Synthetic polynucleotide
ugugccccacagaccccagg

SEQ ID NO: 1651 - RNA, 20 nt, Artificial Sequence
  Synthetic polynucleotide
gauuccaguaaagaccuaag

SEQ ID NO: 1652 - RNA, 20 nt, Artificial Sequence
  Synthetic polynucleotide
gaucccaaccucagacagag

SEQ ID NO: 1653 - RNA, 20 nt, Artificial Sequence
  Synthetic polynucleotide
ucuccacacagcacgcggaa

SEQ ID NO: 1654 - RNA, 20 nt, Artificial Sequence
  Synthetic polynucleotide
ccacccgacugugacccaaa

SEQ ID NO: 1655 - RNA, 20 nt, Artificial Sequence
  Synthetic polynucleotide
guguccccuacccuguuccg

SEQ ID NO: 1656 - RNA, 20 nt, Artificial Sequence
  Synthetic polynucleotide
gacccugaugcaaacaaccu

SEQ ID NO: 1657 - RNA, 20 nt, Artificial Sequence
  Synthetic polynucleotide
guuugugccccacagacccc

SEQ ID NO: 1658 - RNA, 20 nt, Artificial Sequence
  Synthetic polynucleotide
uacccccaaucagguaccac

SEQ ID NO: 1659 - RNA, 20 nt, Artificial Sequence
  Synthetic polynucleotide
guguccccuacccuguuccg

SEQ ID NO: 1660 - RNA, 20 nt, Artificial Sequence
  Synthetic polynucleotide
aaaagccaauuccucgacca

SEQ ID NO: 1661 - RNA, 20 nt, Artificial Sequence
  Synthetic polynucleotide
auaacccuuugccuggagaa

SEQ ID NO: 1662 - RNA, 20 nt, Artificial Sequence
  Synthetic polynucleotide
ucuccuuucaguccucuaag

SEQ ID NO: 1663 - RNA, 20 nt, Artificial Sequence
  Synthetic polynucleotide
guaaucccagguaagaagua

SEQ ID NO: 1664 - RNA, 20 nt, Artificial Sequence
  Synthetic polynucleotide
gaaguuugaucccgaugcga

SEQ ID NO: 1665 - RNA, 20 nt, Artificial Sequence
  Synthetic polynucleotide
aaccacaaaggagagcaucu

SEQ ID NO: 1666 - RNA, 20 nt, Artificial Sequence
  Synthetic polynucleotide
gaaacaggccucuggcucau

SEQ ID NO: 1667 - RNA, 20 nt, Artificial Sequence
  Synthetic polynucleotide
acccuuugccuggagaagga

SEQ ID NO: 1668 - RNA, 20 nt, Artificial Sequence
  Synthetic polynucleotide
gauuccaguaaagaccuaag

SEQ ID NO: 1669 - RNA, 20 nt, Artificial Sequence
  Synthetic polynucleotide
cugaaccuaugaauuccgau

SEQ ID NO: 1670 - RNA, 20 nt, Artificial Sequence
  Synthetic polynucleotide
guccccaccaaugcugccgg

SEQ ID NO: 1671 - RNA, 20 nt, Artificial Sequence
  Synthetic polynucleotide
agguccccaccaaugcugcc

SEQ ID NO: 1672 - RNA, 20 nt, Artificial Sequence
  Synthetic polynucleotide
caccuggggaauccgauuug

SEQ ID NO: 1673 - RNA, 20 nt, Artificial Sequence
  Synthetic polynucleotide
auaaggcacauagcuugacc

SEQ ID NO: 1674 - RNA, 20 nt, Artificial Sequence
  Synthetic polynucleotide
aaacccugauuauggcuaca

SEQ ID NO: 1675 - RNA, 20 nt, Artificial Sequence
  Synthetic polynucleotide
cacagaccccaggagcgacg

SEQ ID NO: 1676 - RNA, 20 nt, Artificial Sequence
  Synthetic polynucleotide
gaccccuacuaugcagacaa

SEQ ID NO: 1677 - RNA, 20 nt, Artificial Sequence
  Synthetic polynucleotide
ccccuacuaugcagacaaaa

SEQ ID NO: 1678 - RNA, 20 nt, Artificial Sequence
  Synthetic polynucleotide
aaacagcugcccuucaucua

SEQ ID NO: 1679 - RNA, 20 nt, Artificial Sequence
  Synthetic polynucleotide
ggguccaagaagccacaaaa

SEQ ID NO: 1680 - RNA, 20 nt, Artificial Sequence
  Synthetic polynucleotide
acagaccccaggagcgacgc

SEQ ID NO: 1681 - RNA, 20 nt, Artificial Sequence
  Synthetic polynucleotide
cuggacacugacuacacacg

SEQ ID NO: 1682 - RNA, 20 nt, Artificial Sequence
  Synthetic polynucleotide
ugacaauccuuccacaucug

SEQ ID NO: 1683 - RNA, 20 nt, Artificial Sequence
  Synthetic polynucleotide
agacagauaagaaccaugau

SEQ ID NO: 1684 - RNA, 20 nt, Artificial Sequence
  Synthetic polynucleotide
uccuggccaacauugaacau

SEQ ID NO: 1685 - RNA, 20 nt, Artificial Sequence
  Synthetic polynucleotide
uggggacauuccucccggca

SEQ ID NO: 1686 - RNA, 20 nt, Artificial Sequence
  Synthetic polynucleotide
auaacccaccggacuggacc

SEQ ID NO: 1687 - RNA, 20 nt, Artificial Sequence
  Synthetic polynucleotide
caguugauaacccuuugccu

SEQ ID NO: 1688 - RNA, 20 nt, Artificial Sequence
  Synthetic polynucleotide
aguguccagagggguacacc

SEQ ID NO: 1689 - RNA, 20 nt, Artificial Sequence
  Synthetic polynucleotide
ccaugaauaacccaccggac

SEQ ID NO: 1690 - RNA, 20 nt, Artificial Sequence
  Synthetic polynucleotide
gugacagugccaauugcacc

SEQ ID NO: 1691 - RNA, 20 nt, Artificial Sequence
  Synthetic polynucleotide
aauuccucgaccagggguaa

SEQ ID NO: 1692 - RNA, 20 nt, Artificial Sequence
  Synthetic polynucleotide
ugggguccaagaagccacaa

SEQ ID NO: 1693 - RNA, 20 nt, Artificial Sequence
  Synthetic polynucleotide
ugacagugccaauugcaccu

SEQ ID NO: 1694 - RNA, 20 nt, Artificial Sequence
  Synthetic polynucleotide
caaaaagccaaagauuucca

SEQ ID NO: 1695 - RNA, 20 nt, Artificial Sequence
  Synthetic polynucleotide
uugcuccuuugacuagacgu

SEQ ID NO: 1696 - RNA, 20 nt, Artificial Sequence
  Synthetic polynucleotide
aaaauguccaccuugguggu

SEQ ID NO: 1697 - RNA, 20 nt, Artificial Sequence
  Synthetic polynucleotide
auaaauaugcaguuugucag

SEQ ID NO: 1698 - RNA, 20 nt, Artificial Sequence
  Synthetic polynucleotide
cacaaucccagccucacagu

SEQ ID NO: 1699 - RNA, 20 nt, Artificial Sequence
  Synthetic polynucleotide
uuugcuccuuugacuagacg

SEQ ID NO: 1700 - RNA, 20 nt, Artificial Sequence
  Synthetic polynucleotide
aguagguccccaccaaugcu

SEQ ID NO: 1701 - RNA, 20 nt, Artificial Sequence
  Synthetic polynucleotide
caaaagccaauuccucgacc

SEQ ID NO: 1702 - RNA, 20 nt, Artificial Sequence
  Synthetic polynucleotide
acagcugcccuucaucuaug

SEQ ID NO: 1703 - RNA, 20 nt, Artificial Sequence
  Synthetic polynucleotide
acaguugauaacccuuugcc

SEQ ID NO: 1704 - RNA, 20 nt, Artificial Sequence
  Synthetic polynucleotide
uagguccccaccaaugcugc

SEQ ID NO: 1705 - RNA, 20 nt, Artificial Sequence
  Synthetic polynucleotide
gcugaaccuaugaauuccga

SEQ ID NO: 1706 - RNA, 20 nt, Artificial Sequence
  Synthetic polynucleotide
agccagaggccuguuucaca

SEQ ID NO: 1707 - RNA, 20 nt, Artificial Sequence
  Synthetic polynucleotide
gacagugccaauugcaccug

SEQ ID NO: 1708 - RNA, 20 nt, Artificial Sequence
  Synthetic polynucleotide
gauaacccuuugccuggaga

SEQ ID NO: 1709 - RNA, 20 nt, Artificial Sequence
  Synthetic polynucleotide
ccaccucuccaccuucauau

SEQ ID NO: 1710 - RNA, 20 nt, Artificial Sequence
  Synthetic polynucleotide
caaaagccaauuccucgacc

SEQ ID NO: 1711 - RNA, 20 nt, Artificial Sequence
  Synthetic polynucleotide
gguuuccugcaagucaaguu

SEQ ID NO: 1712 - RNA, 20 nt, Artificial Sequence
  Synthetic polynucleotide
gaaacaggccucuggcucau

SEQ ID NO: 1713 - RNA, 20 nt, Artificial Sequence
  Synthetic polynucleotide
cauccuggaaguucaguuga

SEQ ID NO: 1714 - RNA, 20 nt, Artificial Sequence
  Synthetic polynucleotide
gcaaaacauucggaacgauu

SEQ ID NO: 1715 - RNA, 20 nt, Artificial Sequence
  Synthetic polynucleotide
ccucugagugaggaugacuu

SEQ ID NO: 1716 - RNA, 20 nt, Artificial Sequence
  Synthetic polynucleotide
cagcugcccuucaucuaugg

SEQ ID NO: 1717 - RNA, 20 nt, Artificial Sequence
  Synthetic polynucleotide
uauuccaacagauggguuac

SEQ ID NO: 1718 - RNA, 20 nt, Artificial Sequence
  Synthetic polynucleotide
gcaccuggggaauccgauuu

SEQ ID NO: 1719 - RNA, 20 nt, Artificial Sequence
  Synthetic polynucleotide
auaacccuuugccuggagaa

SEQ ID NO: 1720 - RNA, 20 nt, Artificial Sequence
  Synthetic polynucleotide
uucgugacccguggaacugg

SEQ ID NO: 1721 - RNA, 20 nt, Artificial Sequence
  Synthetic polynucleotide
aggcaaaucauacuguugcc

SEQ ID NO: 1722 - RNA, 20 nt, Artificial Sequence
  Synthetic polynucleotide
aaucccagguaagaaguaau

SEQ ID NO: 1723 - RNA, 20 nt, Artificial Sequence
  Synthetic polynucleotide
ucacacagguguaccccucu

SEQ ID NO: 1724 - RNA, 20 nt, Artificial Sequence
  Synthetic polynucleotide
auuccauccuacagugaagu

SEQ ID NO: 1725 - RNA, 20 nt, Artificial Sequence
  Synthetic polynucleotide
cucuggacacugacuacaca

SEQ ID NO: 1726 - RNA, 20 nt, Artificial Sequence
  Synthetic polynucleotide
ugcuccuuugacuagacgua

SEQ ID NO: 1727 - RNA, 20 nt, Artificial Sequence
  Synthetic polynucleotide
auuucgaaaacauuuaugcu

SEQ ID NO: 1728 - RNA, 20 nt, Artificial Sequence
  Synthetic polynucleotide
ugcaccuggggaauccgauu

SEQ ID NO: 1729 - RNA, 20 nt, Artificial Sequence
  Synthetic polynucleotide
augaucccaaccucagacag

SEQ ID NO: 1730 - RNA, 20 nt, Artificial Sequence
  Synthetic polynucleotide
aaaaagccaaagauuuccag

SEQ ID NO: 1731 - RNA, 20 nt, Artificial Sequence
  Synthetic polynucleotide
gugacagugccaauugcacc

SEQ ID NO: 1732 - RNA, 20 nt, Artificial Sequence
  Synthetic polynucleotide
ccaccaaugcugccggugaa

SEQ ID NO: 1733 - RNA, 20 nt, Artificial Sequence
  Synthetic polynucleotide
gcaauuccuuccaucaugaa

SEQ ID NO: 1734 - RNA, 20 nt, Artificial Sequence
  Synthetic polynucleotide
cagucaccacucagcauucg

SEQ ID NO: 1735 - RNA, 20 nt, Artificial Sequence
  Synthetic polynucleotide
aagaccucuaagagccuuau

SEQ ID NO: 1736 - RNA, 20 nt, Artificial Sequence
  Synthetic polynucleotide
aaacagcugcccuucaucua

SEQ ID NO: 1737 - RNA, 20 nt, Artificial Sequence
  Synthetic polynucleotide
ucaaaggaacccaaagaaga

SEQ ID NO: 1738 - RNA, 20 nt, Artificial Sequence
  Synthetic polynucleotide
uggggacauuccucccggca

SEQ ID NO: 1739 - RNA, 20 nt, Artificial Sequence
  Synthetic polynucleotide
agcuucugccagaggugaua

SEQ ID NO: 1740 - RNA, 20 nt, Artificial Sequence
  Synthetic polynucleotide
auggaucugcccaugguuag

SEQ ID NO: 1741 - RNA, 20 nt, Artificial Sequence
  Synthetic polynucleotide
uucacacagguguaccccuc

SEQ ID NO: 1742 - RNA, 20 nt, Artificial Sequence
  Synthetic polynucleotide
uccauccuacagugaaguag

SEQ ID NO: 1743 - RNA, 20 nt, Artificial Sequence
  Synthetic polynucleotide
caaaagccaauuccucgacc

SEQ ID NO: 1744 - RNA, 20 nt, Artificial Sequence
  Synthetic polynucleotide
agacacacaaguagcacauu

SEQ ID NO: 1745 - RNA, 20 nt, Artificial Sequence
  Synthetic polynucleotide
acaaaagccaauuccucgac

SEQ ID NO: 1746 - RNA, 20 nt, Artificial Sequence
  Synthetic polynucleotide
cccaugaugcugaauaucag

SEQ ID NO: 1747 - RNA, 20 nt, Artificial Sequence
  Synthetic polynucleotide
gacccaaaaaaaguucaucc

SEQ ID NO: 1748 - RNA, 20 nt, Artificial Sequence
  Synthetic polynucleotide
uuugugccccacagacccca

SEQ ID NO: 1749 - RNA, 20 nt, Artificial Sequence
  Synthetic polynucleotide
uuugcuccuuugacuagacg

SEQ ID NO: 1750 - RNA, 20 nt, Artificial Sequence
  Synthetic polynucleotide
ccucuaagaagaauaucuau

SEQ ID NO: 1751 - RNA, 20 nt, Artificial Sequence
  Synthetic polynucleotide
auggauccauaugaguauuu

SEQ ID NO: 1752 - RNA, 20 nt, Artificial Sequence
  Synthetic polynucleotide
uuggccccauuaaaucccuu

SEQ ID NO: 1753 - RNA, 20 nt, Artificial Sequence
  Synthetic polynucleotide
cuuugacuagacguaggauu

SEQ ID NO: 1754 - RNA, 20 nt, Artificial Sequence
  Synthetic polynucleotide
uucuccuuucaguccucuaa

SEQ ID NO: 1755 - RNA, 20 nt, Artificial Sequence
  Synthetic polynucleotide
aauaaggcacauagcuugac

SEQ ID NO: 1756 - RNA, 20 nt, Artificial Sequence
  Synthetic polynucleotide
aacuaugcaaaugguaauug

SEQ ID NO: 1757 - RNA, 20 nt, Artificial Sequence
  Synthetic polynucleotide
caccaaugcugccggugaac

SEQ ID NO: 1758 - RNA, 20 nt, Artificial Sequence
  Synthetic polynucleotide
auggaucugcccaugguuag

SEQ ID NO: 1759 - RNA, 20 nt, Artificial Sequence
  Synthetic polynucleotide
ugccaauugcaccuggggaa

SEQ ID NO: 1760 - RNA, 20 nt, Artificial Sequence
  Synthetic polynucleotide
aauguccaccuuggugguac

SEQ ID NO: 1761 - RNA, 20 nt, Artificial Sequence
  Synthetic polynucleotide
guugccucccccaggaccuc

SEQ ID NO: 1762 - RNA, 20 nt, Artificial Sequence
  Synthetic polynucleotide
ccauggaucugcccaugguu

SEQ ID NO: 1763 - RNA, 20 nt, Artificial Sequence
  Synthetic polynucleotide
cucuggacacugacuacaca

SEQ ID NO: 1764 - RNA, 20 nt, Artificial Sequence
  Synthetic polynucleotide
aacagcugcccuucaucuau

SEQ ID NO: 1765 - RNA, 20 nt, Artificial Sequence
  Synthetic polynucleotide
gcuuucuccuuucaguccuc

SEQ ID NO: 1766 - RNA, 20 nt, Artificial Sequence
  Synthetic polynucleotide
cgugacccguggaacuggcu

SEQ ID NO: 1767 - RNA, 20 nt, Artificial Sequence
  Synthetic polynucleotide
auggauccuuuuguagaucu

SEQ ID NO: 1768 - RNA, 20 nt, Artificial Sequence
  Synthetic polynucleotide
auccuggaaguucaguugaa

SEQ ID NO: 1769 - RNA, 20 nt, Artificial Sequence
  Synthetic polynucleotide
aagccccuacaauugucuuc

SEQ ID NO: 1770 - RNA, 20 nt, Artificial Sequence
  Synthetic polynucleotide
uggaucugcccaugguuagu

SEQ ID NO: 1771 - RNA, 20 nt, Artificial Sequence
  Synthetic polynucleotide
aaguuggacauuccaaagau

SEQ ID NO: 1772 - RNA, 20 nt, Artificial Sequence
  Synthetic polynucleotide
gauaacccuuugccuggaga

SEQ ID NO: 1773 - RNA, 20 nt, Artificial Sequence
  Synthetic polynucleotide
augagccagaggccuguuuc

SEQ ID NO: 1774 - RNA, 20 nt, Artificial Sequence
  Synthetic polynucleotide
cauccuggaaguucaguuga

SEQ ID NO: 1775 - RNA, 20 nt, Artificial Sequence
  Synthetic polynucleotide
agugcacaugaugagcaugc

SEQ ID NO: 1776 - RNA, 20 nt, Artificial Sequence
  Synthetic polynucleotide
gcacacauucuccagugaaa

SEQ ID NO: 1777 - RNA, 20 nt, Artificial Sequence
  Synthetic polynucleotide
ccauacacaaccugacaaga

SEQ ID NO: 1778 - RNA, 20 nt, Artificial Sequence
  Synthetic polynucleotide
uacgcucccacgguggcaca

SEQ ID NO: 1779 - RNA, 20 nt, Artificial Sequence
  Synthetic polynucleotide
accacaaaggagagcaucuu

SEQ ID NO: 1780 - RNA, 20 nt, Artificial Sequence
  Synthetic polynucleotide
acagucggguggcuuacugu

SEQ ID NO: 1781 - RNA, 20 nt, Artificial Sequence
  Synthetic polynucleotide
cuggccaacauugaacaugc

SEQ ID NO: 1782 - RNA, 20 nt, Artificial Sequence
  Synthetic polynucleotide
cugcccaugguuagugguga

SEQ ID NO: 1783 - RNA, 20 nt, Artificial Sequence
  Synthetic polynucleotide
uucgaaaacauuuaugcuuc

SEQ ID NO: 1784 - RNA, 20 nt, Artificial Sequence
  Synthetic polynucleotide
gcagcacgcagcgucuaggg

SEQ ID NO: 1785 - RNA, 20 nt, Artificial Sequence
  Synthetic polynucleotide
gcagcacgcagcgucuaggg

SEQ ID NO: 1786 - RNA, 20 nt, Artificial Sequence
  Synthetic polynucleotide
guuuaggaccuauaucaggg

SEQ ID NO: 1787 - RNA, 20 nt, Artificial Sequence
  Synthetic polynucleotide
gauuccaguaaagaccuaag

SEQ ID NO: 1788 - RNA, 20 nt, Artificial Sequence
  Synthetic polynucleotide
acuuacaacuugaagcagag

SEQ ID NO: 1789 - RNA, 20 nt, Artificial Sequence
  Synthetic polynucleotide
gcuagaaacauaccuguaug

SEQ ID NO: 1790 - RNA, 20 nt, Artificial Sequence
  Synthetic polynucleotide
accagggcaccacugcugag

SEQ ID NO: 1791 - RNA, 20 nt, Artificial Sequence
  Synthetic polynucleotide
aaccuccauacacaaccuga

SEQ ID NO: 1792 - RNA, 20 nt, Artificial Sequence
  Synthetic polynucleotide
guuuaggaccuauaucaggg

SEQ ID NO: 1793 - RNA, 20 nt, Artificial Sequence
  Synthetic polynucleotide
aacgaccuaguauucaaaag

SEQ ID NO: 1794 - RNA, 20 nt, Artificial Sequence
  Synthetic polynucleotide
uuacgcaaaaacaaugacga

SEQ ID NO: 1795 - RNA, 20 nt, Artificial Sequence
  Synthetic polynucleotide
ccaguaaagaccuaagugag

SEQ ID NO: 1796 - RNA, 20 nt, Artificial Sequence
  Synthetic polynucleotide
gacacugacuacacacgaga

SEQ ID NO: 1797 - RNA, 20 nt, Artificial Sequence
  Synthetic polynucleotide
ugucuucaggccugaaaaug

SEQ ID NO: 1798 - RNA, 20 nt, Artificial Sequence
  Synthetic polynucleotide
uuaccagucugaaugaucgc

SEQ ID NO: 1799 - RNA, 20 nt, Artificial Sequence
  Synthetic polynucleotide
cguccuuacgcugucaucag

SEQ ID NO: 1800 - RNA, 20 nt, Artificial Sequence
  Synthetic polynucleotide
acucgacauuuuugguccag

SEQ ID NO: 1801 - RNA, 20 nt, Artificial Sequence
  Synthetic polynucleotide
uuccaguaaagaccuaagug

SEQ ID NO: 1802 - RNA, 20 nt, Artificial Sequence
  Synthetic polynucleotide
gauuccaguaaagaccuaag

SEQ ID NO: 1803 - RNA, 20 nt, Artificial Sequence
  Synthetic polynucleotide
ggucgugcccuaaaaaaaaa

SEQ ID NO: 1804 - RNA, 20 nt, Artificial Sequence
  Synthetic polynucleotide
uagguuuaggaccuauauca

SEQ ID NO: 1805 - RNA, 20 nt, Artificial Sequence
  Synthetic polynucleotide
ggaccuauaucagggugggg

SEQ ID NO: 1806 - RNA, 20 nt, Artificial Sequence
  Synthetic polynucleotide
agguuuaggaccuauaucag

SEQ ID NO: 1807 - RNA, 20 nt, Artificial Sequence
  Synthetic polynucleotide
acacugacuacacacgagaa

SEQ ID NO: 1808 - RNA, 20 nt, Artificial Sequence
  Synthetic polynucleotide
guaaagaccuaagugagaaa

SEQ ID NO: 1809 - RNA, 20 nt, Artificial Sequence
  Synthetic polynucleotide
acgcagcgucuagggaaaaa

SEQ ID NO: 1810 - RNA, 20 nt, Artificial Sequence
  Synthetic polynucleotide
uuacuugcaaccuagcccgc

SEQ ID NO: 1811 - RNA, 20 nt, Artificial Sequence
  Synthetic polynucleotide
ggacacuuacaacuugaagc

SEQ ID NO: 1812 - RNA, 20 nt, Artificial Sequence
  Synthetic polynucleotide
gauuggucgugcccuaaaaa

SEQ ID NO: 1813 - RNA, 20 nt, Artificial Sequence
  Synthetic polynucleotide
cuggacacugacuacacacg

SEQ ID NO: 1814 - RNA, 20 nt, Artificial Sequence
  Synthetic polynucleotide
aaacauaccuguauguggag

SEQ ID NO: 1815 - RNA, 20 nt, Artificial Sequence
  Synthetic polynucleotide
uuuaccagucugaaugaucg

SEQ ID NO: 1816 - RNA, 20 nt, Artificial Sequence
  Synthetic polynucleotide
accuauaucaggguggggag

SEQ ID NO: 1817 - RNA, 20 nt, Artificial Sequence
  Synthetic polynucleotide
uuaggaccuauaucagggug

SEQ ID NO: 1818 - RNA, 20 nt, Artificial Sequence
  Synthetic polynucleotide
ucacaacgaccuaguauuca

SEQ ID NO: 1819 - RNA, 20 nt, Artificial Sequence
  Synthetic polynucleotide
uuguucugcaaagaaauaag

SEQ ID NO: 1820 - RNA, 20 nt, Artificial Sequence
  Synthetic polynucleotide
ccuguauguggaggaaaaua

SEQ ID NO: 1821 - RNA, 20 nt, Artificial Sequence
  Synthetic polynucleotide
aaaacguccuuacgcuguca

SEQ ID NO: 1822 - RNA, 20 nt, Artificial Sequence
  Synthetic polynucleotide
ucuucaggccugaaaauggg

SEQ ID NO: 1823 - RNA, 20 nt, Artificial Sequence
  Synthetic polynucleotide
uauuuuuuuaccccuggucg

SEQ ID NO: 1824 - RNA, 20 nt, Artificial Sequence
  Synthetic polynucleotide
acuuacuugcaaccuagccc

SEQ ID NO: 1825 - RNA, 20 nt, Artificial Sequence
  Synthetic polynucleotide
auuuuuuuaccccuggucga

SEQ ID NO: 1826 - RNA, 20 nt, Artificial Sequence
  Synthetic polynucleotide
uacuaugaaagucugcagga

SEQ ID NO: 1827 - RNA, 20 nt, Artificial Sequence
  Synthetic polynucleotide
aauauucuuaccuacaaugg

SEQ ID NO: 1828 - RNA, 20 nt, Artificial Sequence
  Synthetic polynucleotide
accuaaacacaagauuccau

SEQ ID NO: 1829 - RNA, 20 nt, Artificial Sequence
  Synthetic polynucleotide
agaggccuggauggaaacaa

SEQ ID NO: 1830 - RNA, 20 nt, Artificial Sequence
  Synthetic polynucleotide
aguaccuacaucaacaauua

SEQ ID NO: 1831 - RNA, 20 nt, Artificial Sequence
  Synthetic polynucleotide
gacacuuacaacuugaagca

SEQ ID NO: 1832 - RNA, 20 nt, Artificial Sequence
  Synthetic polynucleotide
ccauacacaaccugacaaga

SEQ ID NO: 1833 - RNA, 20 nt, Artificial Sequence
  Synthetic polynucleotide
cgcagcgucuagggaaaaau

SEQ ID NO: 1834 - RNA, 20 nt, Artificial Sequence
  Synthetic polynucleotide
gagacuuaccaaauuuccua

SEQ ID NO: 1835 - RNA, 20 nt, Artificial Sequence
  Synthetic polynucleotide
uugucuucaggccugaaaau

SEQ ID NO: 1836 - RNA, 20 nt, Artificial Sequence
  Synthetic polynucleotide
uucuuaccugggauuacaga

SEQ ID NO: 1837 - RNA, 20 nt, Artificial Sequence
  Synthetic polynucleotide
uuuaggaccuauaucagggu

SEQ ID NO: 1838 - RNA, 20 nt, Artificial Sequence
  Synthetic polynucleotide
aacguccuuacgcugucauc

SEQ ID NO: 1839 - RNA, 20 nt, Artificial Sequence
  Synthetic polynucleotide
aggaccuauaucaggguggg

SEQ ID NO: 1840 - RNA, 20 nt, Artificial Sequence
  Synthetic polynucleotide
uuaggaccuauaucagggug

SEQ ID NO: 1841 - RNA, 20 nt, Artificial Sequence
  Synthetic polynucleotide
ugucuucaggccugaaaaug

SEQ ID NO: 1842 - RNA, 20 nt, Artificial Sequence
  Synthetic polynucleotide
auaaauauucuuaccuacaa

SEQ ID NO: 1843 - RNA, 20 nt, Artificial Sequence
  Synthetic polynucleotide
cauaccuguauguggaggaa

SEQ ID NO: 1844 - RNA, 20 nt, Artificial Sequence
  Synthetic polynucleotide
guuuaccagucugaaugauc

SEQ ID NO: 1845 - RNA, 20 nt, Artificial Sequence
  Synthetic polynucleotide
gauuauuacauaccuuccac

SEQ ID NO: 1846 - RNA, 20 nt, Artificial Sequence
  Synthetic polynucleotide
ucaccuuuuugucugcauag

SEQ ID NO: 1847 - RNA, 20 nt, Artificial Sequence
  Synthetic polynucleotide
augaaagucugcaggaggaa

SEQ ID NO: 1848 - RNA, 20 nt, Artificial Sequence
  Synthetic polynucleotide
aaacguccuuacgcugucau

SEQ ID NO: 1849 - RNA, 20 nt, Artificial Sequence
  Synthetic polynucleotide
cacuuacucgacauuuuugg

SEQ ID NO: 1850 - RNA, 20 nt, Artificial Sequence
  Synthetic polynucleotide
cuugguacucaccuguuggu

SEQ ID NO: 1851 - RNA, 20 nt, Artificial Sequence
  Synthetic polynucleotide
gcaauugccugguugggcca

SEQ ID NO: 1852 - RNA, 20 nt, Artificial Sequence
  Synthetic polynucleotide
aacguccuuacgcugucauc

SEQ ID NO: 1853 - RNA, 20 nt, Artificial Sequence
  Synthetic polynucleotide
cauacacaaccugacaagaa

SEQ ID NO: 1854 - RNA, 20 nt, Artificial Sequence
  Synthetic polynucleotide
aaguucugggagaaaaaagc

SEQ ID NO: 1855 - RNA, 20 nt, Artificial Sequence
  Synthetic polynucleotide
ugguuacauaccaccagguu

SEQ ID NO: 1856 - RNA, 20 nt, Artificial Sequence
  Synthetic polynucleotide
ugccuuuaagaauaacauua

SEQ ID NO: 1857 - RNA, 20 nt, Artificial Sequence
  Synthetic polynucleotide
uaagaggccuggauggaaac

SEQ ID NO: 1858 - RNA, 20 nt, Artificial Sequence
  Synthetic polynucleotide
ggacacuuacaacuugaagc

SEQ ID NO: 1859 - RNA, 20 nt, Artificial Sequence
  Synthetic polynucleotide
uauuuuuuuaccccuggucg

SEQ ID NO: 1860 - RNA, 20 nt, Artificial Sequence
  Synthetic polynucleotide
auacccacuuacucgacauu

SEQ ID NO: 1861 - RNA, 20 nt, Artificial Sequence
  Synthetic polynucleotide
cuuacucgacauuuuugguc

SEQ ID NO: 1862 - RNA, 20 nt, Artificial Sequence
  Synthetic polynucleotide
ugguacucaccuguugguaa

SEQ ID NO: 1863 - RNA, 20 nt, Artificial Sequence
  Synthetic polynucleotide
aauagguuuaggaccuauau

SEQ ID NO: 1864 - RNA, 20 nt, Artificial Sequence
  Synthetic polynucleotide
acaacgaccuaguauucaaa

SEQ ID NO: 1865 - RNA, 20 nt, Artificial Sequence
  Synthetic polynucleotide
gccuuuaagaauaacauuaa

SEQ ID NO: 1866 - RNA, 20 nt, Artificial Sequence
  Synthetic polynucleotide
gggugguaccugauuggggg

SEQ ID NO: 1867 - RNA, 20 nt, Artificial Sequence
  Synthetic polynucleotide
acgaccuaguauucaaaaga

SEQ ID NO: 1868 - RNA, 20 nt, Artificial Sequence
  Synthetic polynucleotide
gaaacauaccuguaugugga

SEQ ID NO: 1869 - RNA, 20 nt, Artificial Sequence
  Synthetic polynucleotide
uaaacucaccuuuuugucug

SEQ ID NO: 1870 - RNA, 20 nt, Artificial Sequence
  Synthetic polynucleotide
uacauacccugaaucugugc

SEQ ID NO: 1871 - RNA, 20 nt, Artificial Sequence
  Synthetic polynucleotide
cuagaaacauaccuguaugu

SEQ ID NO: 1872 - RNA, 20 nt, Artificial Sequence
  Synthetic polynucleotide
cgaccuaguauucaaaagaa

SEQ ID NO: 1873 - RNA, 20 nt, Artificial Sequence
  Synthetic polynucleotide
aaguugccuuuaagaauaac

SEQ ID NO: 1874 - RNA, 20 nt, Artificial Sequence
  Synthetic polynucleotide
ggugguaccugauugggggu

SEQ ID NO: 1875 - RNA, 20 nt, Artificial Sequence
  Synthetic polynucleotide
caccuuuuugucugcauagu

SEQ ID NO: 1876 - RNA, 20 nt, Artificial Sequence
  Synthetic polynucleotide
accuaaacacaagauuccau

SEQ ID NO: 1877 - RNA, 20 nt, Artificial Sequence
  Synthetic polynucleotide
cgcagcgucuagggaaaaau

SEQ ID NO: 1878 - RNA, 20 nt, Artificial Sequence
  Synthetic polynucleotide
aauuugggugguaccugauu

SEQ ID NO: 1879 - RNA, 20 nt, Artificial Sequence
  Synthetic polynucleotide
ccuuuuugucugcauaguag

SEQ ID NO: 1880 - RNA, 20 nt, Artificial Sequence
  Synthetic polynucleotide
uuuaccccuggucgaggaau

SEQ ID NO: 1881 - RNA, 20 nt, Artificial Sequence
  Synthetic polynucleotide
uacuuacgcaaaaacaauga

SEQ ID NO: 1882 - RNA, 20 nt, Artificial Sequence
  Synthetic polynucleotide
ccuauaucaggguggggaga

SEQ ID NO: 1883 - RNA, 20 nt, Artificial Sequence
  Synthetic polynucleotide
aauuugggugguaccugauu

SEQ ID NO: 1884 - RNA, 20 nt, Artificial Sequence
  Synthetic polynucleotide
uugguacucaccuguuggua

SEQ ID NO: 1885 - RNA, 20 nt, Artificial Sequence
  Synthetic polynucleotide
auuuaccagggcaccacugc

SEQ ID NO: 1886 - RNA, 20 nt, Artificial Sequence
  Synthetic polynucleotide
acauaccuuccacaguguuu

SEQ ID NO: 1887 - RNA, 20 nt, Artificial Sequence
  Synthetic polynucleotide
caccuguugguaaagguuuu

SEQ ID NO: 1888 - RNA, 20 nt, Artificial Sequence
  Synthetic polynucleotide
gacuuaccaaauuuccuaua

SEQ ID NO: 1889 - RNA, 20 nt, Artificial Sequence
  Synthetic polynucleotide
acacuuacaacuugaagcag

SEQ ID NO: 1890 - RNA, 20 nt, Artificial Sequence
  Synthetic polynucleotide
auuacuucuuaccugggauu

SEQ ID NO: 1891 - RNA, 20 nt, Artificial Sequence
  Synthetic polynucleotide
ugcaauugccugguugggcc

SEQ ID NO: 1892 - RNA, 20 nt, Artificial Sequence
  Synthetic polynucleotide
cggagcuaaaagcaaauaua

SEQ ID NO: 1893 - RNA, 20 nt, Artificial Sequence
  Synthetic polynucleotide
cucggagcuaaaagcaaaua

SEQ ID NO: 1894 - RNA, 20 nt, Artificial Sequence
  Synthetic polynucleotide
caccuuuuugucugcauagu

SEQ ID NO: 1895 - RNA, 20 nt, Artificial Sequence
  Synthetic polynucleotide
aacucaccuuuuugucugca

SEQ ID NO: 1896 - RNA, 20 nt, Artificial Sequence
  Synthetic polynucleotide
agaggccuggauggaaacaa

SEQ ID NO: 1897 - RNA, 20 nt, Artificial Sequence
  Synthetic polynucleotide
aguaccuacaucaacaauua

SEQ ID NO: 1898 - RNA, 20 nt, Artificial Sequence
  Synthetic polynucleotide
auaaaaauauucuguugaag

SEQ ID NO: 1899 - RNA, 20 nt, Artificial Sequence
  Synthetic polynucleotide
ccuauaucaggguggggaga

SEQ ID NO: 1900 - RNA, 20 nt, Artificial Sequence
  Synthetic polynucleotide
ugucuaccuauaaaauuuac

SEQ ID NO: 1901 - RNA, 20 nt, Artificial Sequence
  Synthetic polynucleotide
uaaauaccuguagaauuaaa

SEQ ID NO: 1902 - RNA, 20 nt, Artificial Sequence
  Synthetic polynucleotide
acccacuuacucgacauuuu

SEQ ID NO: 1903 - RNA, 20 nt, Artificial Sequence
  Synthetic polynucleotide
gauuuuguucugcaaagaaa

SEQ ID NO: 1904 - RNA, 20 nt, Artificial Sequence
  Synthetic polynucleotide
uuacccucauuccuucaaau

SEQ ID NO: 1905 - RNA, 20 nt, Artificial Sequence
  Synthetic polynucleotide
uauauuuuuuuaccccuggu

SEQ ID NO: 1906 - RNA, 20 nt, Artificial Sequence
  Synthetic polynucleotide
uaguacacucauauccuuuu

SEQ ID NO: 1907 - RNA, 20 nt, Artificial Sequence
  Synthetic polynucleotide
acccucauuccuucaaaucu

SEQ ID NO: 1908 - RNA, 20 nt, Artificial Sequence
  Synthetic polynucleotide
aauauuacauacccugaauc

SEQ ID NO: 1909 - RNA, 20 nt, Artificial Sequence
  Synthetic polynucleotide
aaguaccuacaucaacaauu

SEQ ID NO: 1910 - RNA, 20 nt, Artificial Sequence
  Synthetic polynucleotide
caccuuuuugucugcauagu

SEQ ID NO: 1911 - RNA, 20 nt, Artificial Sequence
  Synthetic polynucleotide
uuacaacuugaagcagagau

SEQ ID NO: 1912 - DNA, 23 bp, Artificial Sequence
  Synthetic polynucleotide
gagcacgggcgaaagaccgaggg

SEQ ID NO: 1913 - DNA, 23 bp, Artificial Sequence
  Synthetic polynucleotide
gtattacgccacctggaaagaag

SEQ ID NO: 1914 - DNA, 23 bp, Artificial Sequence
  Synthetic polynucleotide
acagagtcaaaaccgcacaggag

SEQ ID NO: 1915 - DNA, 23 bp, Artificial Sequence
  Synthetic polynucleotide
ccacagagtcaaaaccgcacagg

SEQ ID NO: 1916 - DNA, 23 bp, Artificial Sequence
  Synthetic polynucleotide
agcttagcagatacaacctgtgg

SEQ ID NO: 1917 - DNA, 23 bp, Artificial Sequence
  Synthetic polynucleotide
cttagcagatacaacctgtgggg

SEQ ID NO: 1918 - DNA, 23 bp, Artificial Sequence
  Synthetic polynucleotide
tctgcccctatttctcagcgcag

SEQ ID NO: 1919 - DNA, 23 bp, Artificial Sequence
  Synthetic polynucleotide
tcatgaaaatttgcgacacaggg

SEQ ID NO: 1920 - DNA, 23 bp, Artificial Sequence
  Synthetic polynucleotide
ctacttttttccttgccacagag

SEQ ID NO: 1921 - DNA, 23 bp, Artificial Sequence
  Synthetic polynucleotide
gctgaaatggagtaataaggaag

SEQ ID NO: 1922 - DNA, 23 bp, Artificial Sequence
  Synthetic polynucleotide
atagagaatgaattgcaggggag

SEQ ID NO: 1923 - DNA, 23 bp, Artificial Sequence
  Synthetic polynucleotide
atgtgttttagccacgacctggg

SEQ ID NO: 1924 - DNA, 23 bp, Artificial Sequence
  Synthetic polynucleotide
aaacatcaatttagaccgtgtgg

SEQ ID NO: 1925 - DNA, 23 bp, Artificial Sequence
  Synthetic polynucleotide
aaaacattagccgggcacggtgg

SEQ ID NO: 1926 - DNA, 23 bp, Artificial Sequence
  Synthetic polynucleotide
agataatgggctgagcgcggtgg

SEQ ID NO: 1927 - DNA, 23 bp, Artificial Sequence
  Synthetic polynucleotide
ggcctactcagggatcaactggg

SEQ ID NO: 1928 - DNA, 23 bp, Artificial Sequence
  Synthetic polynucleotide
ggagtgcagtggtacgatgttgg

SEQ ID NO: 1929 - DNA, 23 bp, Artificial Sequence
  Synthetic polynucleotide
tggtcatgaggatttaaacggag

SEQ ID NO: 1930 - DNA, 23 bp, Artificial Sequence
  Synthetic polynucleotide
ccccacacagatatacctggtgg

SEQ ID NO: 1931 - DNA, 23 bp, Artificial Sequence
  Synthetic polynucleotide
tgcttggtagcgtaaccaccagg

SEQ ID NO: 1932 - DNA, 23 bp, Artificial Sequence
  Synthetic polynucleotide
acgcccgtaatccagcactttgg

SEQ ID NO: 1933 - DNA, 23 bp, Artificial Sequence
  Synthetic polynucleotide
gggattactaacctgcgtcgagg

SEQ ID NO: 1934 - DNA, 23 bp, Artificial Sequence
  Synthetic polynucleotide
ggattactaacctgcgtcgaggg

SEQ ID NO: 1935 - DNA, 23 bp, Artificial Sequence
  Synthetic polynucleotide
ttatcacgcagccctcgacgcag

SEQ ID NO: 1936 - DNA, 23 bp, Artificial Sequence
  Synthetic polynucleotide
ctagcaaaacagataccaaggag

SEQ ID NO: 1937 - DNA, 23 bp, Artificial Sequence
  Synthetic polynucleotide
ggagacaccgcatgttgtcaggg

SEQ ID NO: 1938 - DNA, 23 bp, Artificial Sequence
  Synthetic polynucleotide
gtgttttgagatccgtaaggcag

SEQ ID NO: 1939 - DNA, 23 bp, Artificial Sequence
  Synthetic polynucleotide
agcgtgttttgagatccgtaagg

SEQ ID NO: 1940 - DNA, 23 bp, Artificial Sequence
  Synthetic polynucleotide
ttacggatctcaaaacacgctag

SEQ ID NO: 1941 - DNA, 23 bp, Artificial Sequence
  Synthetic polynucleotide
ttctgatatatgctacgacccgg

SEQ ID NO: 1942 - DNA, 23 bp, Artificial Sequence
  Synthetic polynucleotide
tgaatcacagacctaaacgtcag

SEQ ID NO: 1943 - DNA, 23 bp, Artificial Sequence
  Synthetic polynucleotide
gcaaggatattctttcccatcag

SEQ ID NO: 1944 - DNA, 23 bp, Artificial Sequence
  Synthetic polynucleotide
taggggacttaacctccacaagg

SEQ ID NO: 1945 - DNA, 23 bp, Artificial Sequence
  Synthetic polynucleotide
tgggaaaaggtattgcctagggg

SEQ ID NO: 1946 - DNA, 23 bp, Artificial Sequence
  Synthetic polynucleotide
tggatacactgaacacaccgagg

SEQ ID NO: 1947 - DNA, 23 bp, Artificial Sequence
  Synthetic polynucleotide
agttcttatatagcaaaccggag

SEQ ID NO: 1948 - DNA, 23 bp, Artificial Sequence
  Synthetic polynucleotide
ataagaactgagctttagagaag

SEQ ID NO: 1949 - DNA, 23 bp, Artificial Sequence
  Synthetic polynucleotide
gctgtcttactattttactgcag

SEQ ID NO: 1950 - DNA, 23 bp, Artificial Sequence
  Synthetic polynucleotide
gtaataactttggcaccaggcag

SEQ ID NO: 1951 - DNA, 23 bp, Artificial Sequence
  Synthetic polynucleotide
ataaagtcttaactaacagagag

SEQ ID NO: 1952 - DNA, 23 bp, Artificial Sequence
  Synthetic polynucleotide
ggagaactgcttgaacccgggag

SEQ ID NO: 1953 - DNA, 23 bp, Artificial Sequence
  Synthetic polynucleotide
tagttatcattgggacacctggg

SEQ ID NO: 1954 - DNA, 23 bp, Artificial Sequence
  Synthetic polynucleotide
agtgagctgagatcgcaccaagg

SEQ ID NO: 1955 - DNA, 23 bp, Artificial Sequence
  Synthetic polynucleotide
attgggtctccaataccaaacag

SEQ ID NO: 1956 - DNA, 23 bp, Artificial Sequence
  Synthetic polynucleotide
ggccctgtaggcgttacactagg

SEQ ID NO: 1957 - DNA, 23 bp, Artificial Sequence
  Synthetic polynucleotide
ggtgggaacaacacacactgggg

SEQ ID NO: 1958 - DNA, 23 bp, Artificial Sequence
  Synthetic polynucleotide
ccacatggatggatacacaaggg

SEQ ID NO: 1959 - DNA, 23 bp, Artificial Sequence
  Synthetic polynucleotide
agtcagctatgattgcaccacag

SEQ ID NO: 1960 - DNA, 23 bp, Artificial Sequence
  Synthetic polynucleotide
gcttgtacgcaaataacagggag

SEQ ID NO: 1961 - DNA, 23 bp, Artificial Sequence
  Synthetic polynucleotide
agccctaaacccgtaaaatgggg

SEQ ID NO: 1962 - DNA, 23 bp, Artificial Sequence
  Synthetic polynucleotide
gctcagctgaaccagagcaagag

SEQ ID NO: 1963 - DNA, 23 bp, Artificial Sequence
  Synthetic polynucleotide
aatctgatttggcgacacaaagg

SEQ ID NO: 1964 - DNA, 23 bp, Artificial Sequence
  Synthetic polynucleotide
ttgcccactggtgatcaccaggg

SEQ ID NO: 1965 - DNA, 23 bp, Artificial Sequence
  Synthetic polynucleotide
gtatgcataggggtatactttag

SEQ ID NO: 1966 - DNA, 23 bp, Artificial Sequence
  Synthetic polynucleotide
tatagacaagtccacgaaccagg

SEQ ID NO: 1967 - DNA, 23 bp, Artificial Sequence
  Synthetic polynucleotide
tagacaagtccacgaaccaggag

SEQ ID NO: 1968 - DNA, 23 bp, Artificial Sequence
  Synthetic polynucleotide
atacctcagaccgggcatggtgg

SEQ ID NO: 1969 - DNA, 23 bp, Artificial Sequence
  Synthetic polynucleotide
aatgaagtggaagtacacagtag

SEQ ID NO: 1970 - DNA, 23 bp, Artificial Sequence
  Synthetic polynucleotide
ataagatggtcacagcttggggg

SEQ ID NO: 1971 - DNA, 23 bp, Artificial Sequence
  Synthetic polynucleotide
tcctgcctcagccttccgaggag

SEQ ID NO: 1972 - DNA, 23 bp, Artificial Sequence
  Synthetic polynucleotide
gcttatgggattaacccacaagg

SEQ ID NO: 1973 - DNA, 23 bp, Artificial Sequence
  Synthetic polynucleotide
ggagccacagattgttagcagag

SEQ ID NO: 1974 - DNA, 23 bp, Artificial Sequence
  Synthetic polynucleotide
acacggaaaacaaatccaggaag

SEQ ID NO: 1975 - DNA, 23 bp, Artificial Sequence
  Synthetic polynucleotide
tgggagatcaacatgcctagtgg

SEQ ID NO: 1976 - DNA, 23 bp, Artificial Sequence
  Synthetic polynucleotide
gcacctgctccatatttagtaag

SEQ ID NO: 1977 - DNA, 23 bp, Artificial Sequence
  Synthetic polynucleotide
cttgagccgtcaaagacacacag

SEQ ID NO: 1978 - DNA, 23 bp, Artificial Sequence
  Synthetic polynucleotide
gtattaccacttcgtgaaaagag

SEQ ID NO: 1979 - DNA, 23 bp, Artificial Sequence
  Synthetic polynucleotide
gcttgtttactcttttcacgaag

SEQ ID NO: 1980 - DNA, 23 bp, Artificial Sequence
  Synthetic polynucleotide
ccatctttgttgtttcaaggcag

SEQ ID NO: 1981 - DNA, 23 bp, Artificial Sequence
  Synthetic polynucleotide
gaatactcccaaattcagggagg

SEQ ID NO: 1982 - DNA, 23 bp, Artificial Sequence
  Synthetic polynucleotide
agagcatactgacctcaacgtgg

SEQ ID NO: 1983 - DNA, 23 bp, Artificial Sequence
  Synthetic polynucleotide
tagatacccatcttatacacagg

SEQ ID NO: 1984 - DNA, 23 bp, Artificial Sequence
  Synthetic polynucleotide
acactgctgcttcacatcagggg

SEQ ID NO: 1985 - DNA, 23 bp, Artificial Sequence
  Synthetic polynucleotide
gataccattaactatcacctggg

SEQ ID NO: 1986 - DNA, 23 bp, Artificial Sequence
  Synthetic polynucleotide
gagactctattctaaacgtgagg

SEQ ID NO: 1987 - DNA, 23 bp, Artificial Sequence
  Synthetic polynucleotide
taactgcagtagttgaccattgg

SEQ ID NO: 1988 - DNA, 23 bp, Artificial Sequence
  Synthetic polynucleotide
tttgctatgacacagtacagaag

SEQ ID NO: 1989 - DNA, 23 bp, Artificial Sequence
  Synthetic polynucleotide
tcttagacggtataaagtgggag

SEQ ID NO: 1990 - DNA, 23 bp, Artificial Sequence
  Synthetic polynucleotide
gagggtcacttgaatcccagagg

SEQ ID NO: 1991 - DNA, 23 bp, Artificial Sequence
  Synthetic polynucleotide
ttttaaatttgatttccgaagag

SEQ ID NO: 1992 - DNA, 23 bp, Artificial Sequence
  Synthetic polynucleotide
ttcgtgacctgacaattgggcag

SEQ ID NO: 1993 - DNA, 23 bp, Artificial Sequence
  Synthetic polynucleotide
aagccctaaatcaatgccgaggg

SEQ ID NO: 1994 - DNA, 23 bp, Artificial Sequence
  Synthetic polynucleotide
gggcatgtccctttcatacagag

SEQ ID NO: 1995 - DNA, 23 bp, Artificial Sequence
  Synthetic polynucleotide
gcactcttcccaggatacaagag

SEQ ID NO: 1996 - DNA, 23 bp, Artificial Sequence
  Synthetic polynucleotide
ggaatattcctagtcccaagagg

SEQ ID NO: 1997 - DNA, 23 bp, Artificial Sequence
  Synthetic polynucleotide
cctctcataagaaatcactggag

SEQ ID NO: 1998 - DNA, 23 bp, Artificial Sequence
  Synthetic polynucleotide
tacactgtaaacggcctgagagg

SEQ ID NO: 1999 - DNA, 23 bp, Artificial Sequence
  Synthetic polynucleotide
ttacactgtaaacggcctgagag

SEQ ID NO: 2000 - DNA, 23 bp, Artificial Sequence
  Synthetic polynucleotide
ccccaaaatcgattaagctgagg

SEQ ID NO: 2001 - DNA, 23 bp, Artificial Sequence
  Synthetic polynucleotide
cctccctcatgggaacatggagg

SEQ ID NO: 2002 - DNA, 23 bp, Artificial Sequence
  Synthetic polynucleotide
gcacagtctgagcatgtacagag

SEQ ID NO: 2003 - DNA, 23 bp, Artificial Sequence
  Synthetic polynucleotide
ggtgctagagaacagccaatcag

SEQ ID NO: 2004 - DNA, 23 bp, Artificial Sequence
  Synthetic polynucleotide
cgtcatgtagaatatggcagaag

SEQ ID NO: 2005 - DNA, 23 bp, Artificial Sequence
  Synthetic polynucleotide
aagacatgttacattgtaggggg

SEQ ID NO: 2006 - DNA, 23 bp, Artificial Sequence
  Synthetic polynucleotide
agtcaactctgcaaaacaaggag

SEQ ID NO: 2007 - DNA, 23 bp, Artificial Sequence
  Synthetic polynucleotide
ttaatgaaagccaatcatcgagg

SEQ ID NO: 2008 - DNA, 23 bp, Artificial Sequence
  Synthetic polynucleotide
actctggtaactccacctggagg

SEQ ID NO: 2009 - DNA, 23 bp, Artificial Sequence
  Synthetic polynucleotide
agctatagtagaatcctgtgtgg

SEQ ID NO: 2010 - DNA, 23 bp, Artificial Sequence
  Synthetic polynucleotide
tgtacatagacccagcacaaggg

SEQ ID NO: 2011 - DNA, 23 bp, Artificial Sequence
  Synthetic polynucleotide
ttaggaaccaggctgcacagcag

SEQ ID NO: 2012 - DNA, 23 bp, Artificial Sequence
  Synthetic polynucleotide
tattgtgaactgcacatacgagg

SEQ ID NO: 2013 - DNA, 23 bp, Artificial Sequence
  Synthetic polynucleotide
attgtgaactgcacatacgaggg

SEQ ID NO: 2014 - DNA, 23 bp, Artificial Sequence
  Synthetic polynucleotide
gataacacctggcaatccagcag

SEQ ID NO: 2015 - DNA, 23 bp, Artificial Sequence
  Synthetic polynucleotide
gctctcttagtgataacacctgg

SEQ ID NO: 2016 - DNA, 23 bp, Artificial Sequence
  Synthetic polynucleotide
aaactgttaacacaagagggagg

SEQ ID NO: 2017 - DNA, 23 bp, Artificial Sequence
  Synthetic polynucleotide
caacagactgtaagccctagagg

SEQ ID NO: 2018 - DNA, 23 bp, Artificial Sequence
  Synthetic polynucleotide
gggacacaatactaactaggtgg

SEQ ID NO: 2019 - DNA, 23 bp, Artificial Sequence
  Synthetic polynucleotide
gattttaaggtttacccccgcag

SEQ ID NO: 2020 - DNA, 23 bp, Artificial Sequence
  Synthetic polynucleotide
tgacactctggaacattagagag

SEQ ID NO: 2021 - DNA, 23 bp, Artificial Sequence
  Synthetic polynucleotide
tcactctctctaatgttccagag

SEQ ID NO: 2022 - DNA, 23 bp, Artificial Sequence
  Synthetic polynucleotide
ttaagagtatgaaatcctacaag

SEQ ID NO: 2023 - DNA, 23 bp, Artificial Sequence
  Synthetic polynucleotide
ggaggtcgcttgagtgcacgagg

SEQ ID NO: 2024 - DNA, 23 bp, Artificial Sequence
  Synthetic polynucleotide
atattgcgtttataccacagaag

SEQ ID NO: 2025 - DNA, 23 bp, Artificial Sequence
  Synthetic polynucleotide
ttaccattgagagatccttggag

SEQ ID NO: 2026 - DNA, 23 bp, Artificial Sequence
  Synthetic polynucleotide
aaggtgatgttatcgaacatagg

SEQ ID NO: 2027 - DNA, 23 bp, Artificial Sequence
  Synthetic polynucleotide
tgatgttatcgaacataggagag

SEQ ID NO: 2028 - DNA, 23 bp, Artificial Sequence
  Synthetic polynucleotide
gacaaggatacgcttaaccctgg

SEQ ID NO: 2029 - DNA, 23 bp, Artificial Sequence
  Synthetic polynucleotide
ttaagcgtatccttgtcagccag

SEQ ID NO: 2030 - DNA, 23 bp, Artificial Sequence
  Synthetic polynucleotide
gatccattagaaatgctgatcag

SEQ ID NO: 2031 - DNA, 23 bp, Artificial Sequence
  Synthetic polynucleotide
gcactccagcctgaaccagagag

SEQ ID NO: 2032 - DNA, 23 bp, Artificial Sequence
  Synthetic polynucleotide
ggagaattacttgaacccagcag

SEQ ID NO: 2033 - DNA, 23 bp, Artificial Sequence
  Synthetic polynucleotide
gttaataatcatgctccgaagag

SEQ ID NO: 2034 - DNA, 23 bp, Artificial Sequence
  Synthetic polynucleotide
gagttaataatcatgctccgaag

SEQ ID NO: 2035 - DNA, 23 bp, Artificial Sequence
  Synthetic polynucleotide
gaggttatgtcatctccacaggg

SEQ ID NO: 2036 - DNA, 23 bp, Artificial Sequence
  Synthetic polynucleotide
tcttgcttattgcttgacaacag

SEQ ID NO: 2037 - DNA, 23 bp, Artificial Sequence
  Synthetic polynucleotide
gagccatgatcacaccactgcgg

SEQ ID NO: 2038 - DNA, 23 bp, Artificial Sequence
  Synthetic polynucleotide
aaggcgggtgaatcacttgaggg

SEQ ID NO: 2039 - DNA, 23 bp, Artificial Sequence
  Synthetic polynucleotide
caaggcgggtgaatcacttgagg

SEQ ID NO: 2040 - DNA, 23 bp, Artificial Sequence
  Synthetic polynucleotide
accctggtcaatagccacagtgg

SEQ ID NO: 2041 - DNA, 23 bp, Artificial Sequence
  Synthetic polynucleotide
aatgcaggtatactccactgtgg

SEQ ID NO: 2042 - DNA, 23 bp, Artificial Sequence
  Synthetic polynucleotide
atacactcttgacaaccatagag

SEQ ID NO: 2043 - DNA, 23 bp, Artificial Sequence
  Synthetic polynucleotide
ccccattctcaaattccaagcag

SEQ ID NO: 2044 - DNA, 23 bp, Artificial Sequence
  Synthetic polynucleotide
gatgtgttcttcaagtagcagag

SEQ ID NO: 2045 - DNA, 23 bp, Artificial Sequence
  Synthetic polynucleotide
gagactaatgtcgaacaacatgg

SEQ ID NO: 2046 - DNA, 23 bp, Artificial Sequence
  Synthetic polynucleotide
ttttagctagaaccagggtggag

SEQ ID NO: 2047 - DNA, 23 bp, Artificial Sequence
  Synthetic polynucleotide
ctgactaatgaaaactcctgtgg

SEQ ID NO: 2048 - DNA, 23 bp, Artificial Sequence
  Synthetic polynucleotide
taggctgacagggttacagaggg

SEQ ID NO: 2049 - DNA, 23 bp, Artificial Sequence
  Synthetic polynucleotide
atgctagtggtaccatgcatggg

SEQ ID NO: 2050 - DNA, 23 bp, Artificial Sequence
  Synthetic polynucleotide
gcctcactagactttcagtgtag

SEQ ID NO: 2051 - DNA, 23 bp, Artificial Sequence
  Synthetic polynucleotide
gcaccccaaaacaattaccacag

SEQ ID NO: 2052 - DNA, 23 bp, Artificial Sequence
  Synthetic polynucleotide
ttaagccaaagcctaatccacag

SEQ ID NO: 2053 - DNA, 23 bp, Artificial Sequence
  Synthetic polynucleotide
gctgcattatcccctaacaagag

SEQ ID NO: 2054 - DNA, 23 bp, Artificial Sequence
  Synthetic polynucleotide
ctatttatagagcacaggcagag

SEQ ID NO: 2055 - DNA, 23 bp, Artificial Sequence
  Synthetic polynucleotide
tgagctataagtatcaacactgg

SEQ ID NO: 2056 - DNA, 23 bp, Artificial Sequence
  Synthetic polynucleotide
ccaggcacattgtcaataggcag

SEQ ID NO: 2057 - DNA, 23 bp, Artificial Sequence
  Synthetic polynucleotide
gtcactcaagagctctaacggag

SEQ ID NO: 2058 - DNA, 23 bp, Artificial Sequence
  Synthetic polynucleotide
actcaagagctctaacggagagg

SEQ ID NO: 2059 - DNA, 23 bp, Artificial Sequence
  Synthetic polynucleotide
tctgtagcctatgggccaaagag

SEQ ID NO: 2060 - DNA, 23 bp, Artificial Sequence
  Synthetic polynucleotide
ttaggattgacttggcgatgcgg

SEQ ID NO: 2061 - DNA, 23 bp, Artificial Sequence
  Synthetic polynucleotide
gtttgtagttctcctcgaagagg

SEQ ID NO: 2062 - DNA, 23 bp, Artificial Sequence
  Synthetic polynucleotide
agggagactttataaaccggagg

SEQ ID NO: 2063 - DNA, 23 bp, Artificial Sequence
  Synthetic polynucleotide
agtgagccaaaatcgcgccacgg

SEQ ID NO: 2064 - DNA, 23 bp, Artificial Sequence
  Synthetic polynucleotide
aggtgggcagaacacaacgtcag

SEQ ID NO: 2065 - DNA, 23 bp, Artificial Sequence
  Synthetic polynucleotide
aaacttacaatcatggtcgaagg

SEQ ID NO: 2066 - DNA, 23 bp, Artificial Sequence
  Synthetic polynucleotide
ggctttttatttgtatgcggcag

SEQ ID NO: 2067 - DNA, 23 bp, Artificial Sequence
  Synthetic polynucleotide
catttctcaccgtattcaggagg

SEQ ID NO: 2068 - DNA, 23 bp, Artificial Sequence
  Synthetic polynucleotide
gcatttctcaccgtattcaggag

SEQ ID NO: 2069 - DNA, 23 bp, Artificial Sequence
  Synthetic polynucleotide
acttacctcctgaatacggtgag

SEQ ID NO: 2070 - DNA, 23 bp, Artificial Sequence
  Synthetic polynucleotide
gattcctcacttactaaccacgg

SEQ ID NO: 2071 - DNA, 23 bp, Artificial Sequence
  Synthetic polynucleotide
attaccgtggttagtaagtgagg

SEQ ID NO: 2072 - DNA, 23 bp, Artificial Sequence
  Synthetic polynucleotide
cctaagttgaaggaacgtcagag

SEQ ID NO: 2073 - DNA, 23 bp, Artificial Sequence
  Synthetic polynucleotide
cgcatctatcaatgtcaccttgg

SEQ ID NO: 2074 - DNA, 23 bp, Artificial Sequence
  Synthetic polynucleotide
ggaacaaaagagacgacagtggg

SEQ ID NO: 2075 - DNA, 23 bp, Artificial Sequence
  Synthetic polynucleotide
tatgaccatgaataacccaccgg

SEQ ID NO: 2076 - DNA, 23 bp, Artificial Sequence
  Synthetic polynucleotide
catttttggtccagtccggtggg

SEQ ID NO: 2077 - DNA, 23 bp, Artificial Sequence
  Synthetic polynucleotide
agggtgtgtccataacccaacag

SEQ ID NO: 2078 - DNA, 23 bp, Artificial Sequence
  Synthetic polynucleotide
gtaaaagtgtacctaaacacaag

SEQ ID NO: 2079 - DNA, 23 bp, Artificial Sequence
  Synthetic polynucleotide
tcacttttcttcgtgacccgtgg

SEQ ID NO: 2080 - DNA, 23 bp, Artificial Sequence
  Synthetic polynucleotide
ttaatcttaggcttagtaagcag

SEQ ID NO: 2081 - DNA, 23 bp, Artificial Sequence
  Synthetic polynucleotide
gagccacctagacaatacagaag

SEQ ID NO: 2082 - DNA, 23 bp, Artificial Sequence
  Synthetic polynucleotide
gccacctagacaatacagaaggg

SEQ ID NO: 2083 - DNA, 23 bp, Artificial Sequence
  Synthetic polynucleotide
tcaccactacctaattagagaag

SEQ ID NO: 2084 - DNA, 23 bp, Artificial Sequence
  Synthetic polynucleotide
gagagtggggttaaacaccaggg

SEQ ID NO: 2085 - DNA, 23 bp, Artificial Sequence
  Synthetic polynucleotide
tgtaggggctttgatccagtcag

SEQ ID NO: 2086 - DNA, 23 bp, Artificial Sequence
  Synthetic polynucleotide
ctgctagatagcttagaaccagg

SEQ ID NO: 2087 - DNA, 23 bp, Artificial Sequence
  Synthetic polynucleotide
cctggttctaagctatctagcag

SEQ ID NO: 2088 - DNA, 23 bp, Artificial Sequence
  Synthetic polynucleotide
tcatctgtatgcactctcagaag

SEQ ID NO: 2089 - DNA, 23 bp, Artificial Sequence
  Synthetic polynucleotide
gctgtctcagccaatcacagcag

SEQ ID NO: 2090 - DNA, 23 bp, Artificial Sequence
  Synthetic polynucleotide
gcttaaatgccatcacctcagag

SEQ ID NO: 2091 - DNA, 23 bp, Artificial Sequence
  Synthetic polynucleotide
tctttcctcctgtttcggtggag

SEQ ID NO: 2092 - DNA, 23 bp, Artificial Sequence
  Synthetic polynucleotide
gccagattatgtgtagactgtgg

SEQ ID NO: 2093 - DNA, 23 bp, Artificial Sequence
  Synthetic polynucleotide
gttttagcccaatataaccacag

SEQ ID NO: 2094 - DNA, 23 bp, Artificial Sequence
  Synthetic polynucleotide
gcacatgatactctacactctgg

SEQ ID NO: 2095 - DNA, 23 bp, Artificial Sequence
  Synthetic polynucleotide
gaagagtatatccccaacgaagg

SEQ ID NO: 2096 - DNA, 23 bp, Artificial Sequence
  Synthetic polynucleotide
ggaatgcagcataacggcaaagg

SEQ ID NO: 2097 - DNA, 23 bp, Artificial Sequence
  Synthetic polynucleotide
ccatgtatattaaatctacagag

SEQ ID NO: 2098 - DNA, 23 bp, Artificial Sequence
  Synthetic polynucleotide
aacactcctgaacctcgggaagg

SEQ ID NO: 2099 - DNA, 23 bp, Artificial Sequence
  Synthetic polynucleotide
tactgagtctgcctcttccggag

SEQ ID NO: 2100 - DNA, 23 bp, Artificial Sequence
  Synthetic polynucleotide
tatgtggtacaatactccggaag

SEQ ID NO: 2101 - DNA, 23 bp, Artificial Sequence
  Synthetic polynucleotide
taggctataccacatagcctagg

SEQ ID NO: 2102 - DNA, 23 bp, Artificial Sequence
  Synthetic polynucleotide
gtataggctaccatacacctagg

SEQ ID NO: 2103 - DNA, 23 bp, Artificial Sequence
  Synthetic polynucleotide
ggtttgtataagtgcaccctagg

SEQ ID NO: 2104 - DNA, 23 bp, Artificial Sequence
  Synthetic polynucleotide
gaaaataaattaaggcaacgtgg

SEQ ID NO: 2105 - DNA, 23 bp, Artificial Sequence
  Synthetic polynucleotide
gtgctcgaattaacacaagacag

SEQ ID NO: 2106 - DNA, 23 bp, Artificial Sequence
  Synthetic polynucleotide
tcttctttctggaaaacgaagag

SEQ ID NO: 2107 - DNA, 23 bp, Artificial Sequence
  Synthetic polynucleotide
cgtgtgtagtcagtgtccagagg

SEQ ID NO: 2108 - DNA, 23 bp, Artificial Sequence
  Synthetic polynucleotide
tgatatactcaggaaggcgagag

SEQ ID NO: 2109 - DNA, 23 bp, Artificial Sequence
  Synthetic polynucleotide
gtacttaactaggaccccatggg

SEQ ID NO: 2110 - DNA, 23 bp, Artificial Sequence
  Synthetic polynucleotide
ccaaaccatgaaaaccctagaag

SEQ ID NO: 2111 - DNA, 23 bp, Artificial Sequence
  Synthetic polynucleotide
gcatggtagtggtacccaaacag

SEQ ID NO: 2112 - DNA, 23 bp, Artificial Sequence
  Synthetic polynucleotide
gacaactacctaatgcatgcagg

SEQ ID NO: 2113 - DNA, 23 bp, Artificial Sequence
  Synthetic polynucleotide
ataggtggagcaaaccaccatag

SEQ ID NO: 2114 - DNA, 23 bp, Artificial Sequence
  Synthetic polynucleotide
ggtgggcaatgagaacacatggg

SEQ ID NO: 2115 - DNA, 23 bp, Artificial Sequence
  Synthetic polynucleotide
gagaagatcatcacacactgggg

SEQ ID NO: 2116 - DNA, 23 bp, Artificial Sequence
  Synthetic polynucleotide
atgggtgcagcaaaccaccatgg

SEQ ID NO: 2117 - DNA, 23 bp, Artificial Sequence
  Synthetic polynucleotide
acatgggtagacacgtgccatgg

SEQ ID NO: 2118 - DNA, 23 bp, Artificial Sequence
  Synthetic polynucleotide
tacgacaaagaagatcatgtagg

SEQ ID NO: 2119 - DNA, 23 bp, Artificial Sequence
  Synthetic polynucleotide
cggttacaacagaggctctgcgg

SEQ ID NO: 2120 - DNA, 23 bp, Artificial Sequence
  Synthetic polynucleotide
agaaggccaagcatataccgcag

SEQ ID NO: 2121 - DNA, 23 bp, Artificial Sequence
  Synthetic polynucleotide
acacacaatggatttccccagag

SEQ ID NO: 2122 - DNA, 23 bp, Artificial Sequence
  Synthetic polynucleotide
actgttttagtcataccccatag

SEQ ID NO: 2123 - DNA, 23 bp, Artificial Sequence
  Synthetic polynucleotide
ggagtctaatgtattaggggagg

SEQ ID NO: 2124 - DNA, 23 bp, Artificial Sequence
  Synthetic polynucleotide
actacctagggaattcccagaag

SEQ ID NO: 2125 - DNA, 23 bp, Artificial Sequence
  Synthetic polynucleotide
tatgcccttcgacaccaaggtgg

SEQ ID NO: 2126 - DNA, 23 bp, Artificial Sequence
  Synthetic polynucleotide
gtttccaccttggtgtcgaaggg

SEQ ID NO: 2127 - DNA, 23 bp, Artificial Sequence
  Synthetic polynucleotide
tgctaaatgtgtatcacccgagg

SEQ ID NO: 2128 - DNA, 23 bp, Artificial Sequence
  Synthetic polynucleotide
tttagggtaagagaactcgggag

SEQ ID NO: 2129 - DNA, 23 bp, Artificial Sequence
  Synthetic polynucleotide
ttataagcagggaggcctgagag

SEQ ID NO: 2130 - DNA, 23 bp, Artificial Sequence
  Synthetic polynucleotide
gaagttgcccaataccaaagagg

SEQ ID NO: 2131 - DNA, 23 bp, Artificial Sequence
  Synthetic polynucleotide
agaagttgcccaataccaaagag

SEQ ID NO: 2132 - DNA, 23 bp, Artificial Sequence
  Synthetic polynucleotide
ttttctgcaaggcgaagcagcag

SEQ ID NO: 2133 - DNA, 23 bp, Artificial Sequence
  Synthetic polynucleotide
tgctgtggactgcaacggtgtgg

SEQ ID NO: 2134 - DNA, 23 bp, Artificial Sequence
  Synthetic polynucleotide
ctgagcgtccatcaaccagggag

SEQ ID NO: 2135 - DNA, 23 bp, Artificial Sequence
  Synthetic polynucleotide
gtagctcctaagttgaaacggag

SEQ ID NO: 2136 - DNA, 23 bp, Artificial Sequence
  Synthetic polynucleotide
tagctcctaagttgaaacggagg

SEQ ID NO: 2137 - DNA, 23 bp, Artificial Sequence
  Synthetic polynucleotide
aaggtctacgagtcactaagtgg

SEQ ID NO: 2138 - DNA, 23 bp, Artificial Sequence
  Synthetic polynucleotide
gtaagagacaaccattacaggag

SEQ ID NO: 2139 - DNA, 23 bp, Artificial Sequence
  Synthetic polynucleotide
actggctgtatatcataggagag

SEQ ID NO: 2140 - DNA, 23 bp, Artificial Sequence
  Synthetic polynucleotide
gctctcctatgatatacagccag

SEQ ID NO: 2141 - DNA, 23 bp, Artificial Sequence
  Synthetic polynucleotide
gcacgaccaatcaaatacacaag

SEQ ID NO: 2142 - DNA, 23 bp, Artificial Sequence
  Synthetic polynucleotide
tgtcatgggactaaaaacacagg

SEQ ID NO: 2143 - DNA, 23 bp, Artificial Sequence
  Synthetic polynucleotide
gcaaatctgtaccaccaaggtgg

SEQ ID NO: 2144 - DNA, 23 bp, Artificial Sequence
  Synthetic polynucleotide
tgtgcaaatctgtaccaccaagg

SEQ ID NO: 2145 - DNA, 23 bp, Artificial Sequence
  Synthetic polynucleotide
ggaacaccacccaatgactgagg

SEQ ID NO: 2146 - DNA, 23 bp, Artificial Sequence
  Synthetic polynucleotide
ataaaaggttaccatcttgggag

SEQ ID NO: 2147 - DNA, 23 bp, Artificial Sequence
  Synthetic polynucleotide
ctatatgccaggctaataagcag

SEQ ID NO: 2148 - DNA, 23 bp, Artificial Sequence
  Synthetic polynucleotide
tgctaactcagcgagcacatggg

SEQ ID NO: 2149 - DNA, 23 bp, Artificial Sequence
  Synthetic polynucleotide
agttctgcgatcattcagactgg

SEQ ID NO: 2150 - DNA, 23 bp, Artificial Sequence
  Synthetic polynucleotide
ggttacctagagcccctactgag

SEQ ID NO: 2151 - DNA, 23 bp, Artificial Sequence
  Synthetic polynucleotide
tgatggccaacactaaggtgagg

SEQ ID NO: 2152 - DNA, 23 bp, Artificial Sequence
  Synthetic polynucleotide
ttactagtatagcttcaagagag

SEQ ID NO: 2153 - DNA, 23 bp, Artificial Sequence
  Synthetic polynucleotide
atagaggctagtcttacacatgg

SEQ ID NO: 2154 - DNA, 23 bp, Artificial Sequence
  Synthetic polynucleotide
taagactagcctctatagcaagg

SEQ ID NO: 2155 - DNA, 23 bp, Artificial Sequence
  Synthetic polynucleotide
cacgcgatgctataggccagtgg

SEQ ID NO: 2156 - DNA, 23 bp, Artificial Sequence
  Synthetic polynucleotide
cactggcctatagcatcgcgtgg

SEQ ID NO: 2157 - DNA, 23 bp, Artificial Sequence
  Synthetic polynucleotide
actgtgacaagtcaacgtggcag

SEQ ID NO: 2158 - DNA, 23 bp, Artificial Sequence
  Synthetic polynucleotide
ccaactgtgacaagtcaacgtgg

SEQ ID NO: 2159 - DNA, 23 bp, Artificial Sequence
  Synthetic polynucleotide
gtagttcctccattagtcaagag

SEQ ID NO: 2160 - DNA, 23 bp, Artificial Sequence
  Synthetic polynucleotide
tctatatcaggaaacttgcgaag

SEQ ID NO: 2161 - DNA, 23 bp, Artificial Sequence
  Synthetic polynucleotide
acacggataagaccacatgagag

SEQ ID NO: 2162 - DNA, 23 bp, Artificial Sequence
  Synthetic polynucleotide
ttaccagatgaatcttcaggaag

SEQ ID NO: 2163 - DNA, 23 bp, Artificial Sequence
  Synthetic polynucleotide
tgatgtatccatgatccgcaaag

SEQ ID NO: 2164 - DNA, 23 bp, Artificial Sequence
  Synthetic polynucleotide
tactcgcccatagatatcgaggg

SEQ ID NO: 2165 - DNA, 23 bp, Artificial Sequence
  Synthetic polynucleotide
ctactcgcccatagatatcgagg

SEQ ID NO: 2166 - DNA, 23 bp, Artificial Sequence
  Synthetic polynucleotide
ctcaactggaaatcgtcccaggg

SEQ ID NO: 2167 - DNA, 23 bp, Artificial Sequence
  Synthetic polynucleotide
agctaacatgatactaaccaggg

SEQ ID NO: 2168 - DNA, 23 bp, Artificial Sequence
  Synthetic polynucleotide
ataaagctatagtaaccaaacag

SEQ ID NO: 2169 - DNA, 23 bp, Artificial Sequence
  Synthetic polynucleotide
ctcaacatcactaatcaccaggg

SEQ ID NO: 2170 - DNA, 23 bp, Artificial Sequence
  Synthetic polynucleotide
ggcaacatgaatgaacctggagg

SEQ ID NO: 2171 - DNA, 23 bp, Artificial Sequence
  Synthetic polynucleotide
ctacttctatgacaaccctttag

SEQ ID NO: 2172 - DNA, 23 bp, Artificial Sequence
  Synthetic polynucleotide
agtagaatagtggttatcggagg

SEQ ID NO: 2173 - DNA, 23 bp, Artificial Sequence
  Synthetic polynucleotide
ctagtcatccaacgattcaatag

SEQ ID NO: 2174 - DNA, 23 bp, Artificial Sequence
  Synthetic polynucleotide
tctctggcccggtactcacgtag

SEQ ID NO: 2175 - DNA, 23 bp, Artificial Sequence
  Synthetic polynucleotide
acacagggagaaaactacgtgag

SEQ ID NO: 2176 - DNA, 23 bp, Artificial Sequence
  Synthetic polynucleotide
gtccaaatccaatataactgggg

SEQ ID NO: 2177 - DNA, 23 bp, Artificial Sequence
  Synthetic polynucleotide
tgccacgataaggcccaaagagg

SEQ ID NO: 2178 - DNA, 23 bp, Artificial Sequence
  Synthetic polynucleotide
aatttcatcaacaagccagggag

SEQ ID NO: 2179 - DNA, 23 bp, Artificial Sequence
  Synthetic polynucleotide
ccacagatcagcagtccacgtgg

SEQ ID NO: 2180 - DNA, 23 bp, Artificial Sequence
  Synthetic polynucleotide
gtagagaaagaaatagaacgaag

SEQ ID NO: 2181 - DNA, 23 bp, Artificial Sequence
  Synthetic polynucleotide
ggaagggcaaaactttcccagag

SEQ ID NO: 2182 - DNA, 23 bp, Artificial Sequence
  Synthetic polynucleotide
aagattgtagagacctcaagggg

SEQ ID NO: 2183 - DNA, 23 bp, Artificial Sequence
  Synthetic polynucleotide
acagatggtgatgaccaatgggg

SEQ ID NO: 2184 - DNA, 23 bp, Artificial Sequence
  Synthetic polynucleotide
ggggccgtgcaaatatatggagg

SEQ ID NO: 2185 - DNA, 23 bp, Artificial Sequence
  Synthetic polynucleotide
gggccgtgcaaatatatggaggg

SEQ ID NO: 2186 - DNA, 23 bp, Artificial Sequence
  Synthetic polynucleotide
cctcaagtgatcgcccacctcgg

SEQ ID NO: 2187 - DNA, 23 bp, Artificial Sequence
  Synthetic polynucleotide
gggagcttagactagtatggtag

SEQ ID NO: 2188 - DNA, 23 bp, Artificial Sequence
  Synthetic polynucleotide
agagttgcacagtagcccaatag

SEQ ID NO: 2189 - DNA, 23 bp, Artificial Sequence
  Synthetic polynucleotide
tctggattattctctctggacag

SEQ ID NO: 2190 - DNA, 23 bp, Artificial Sequence
  Synthetic polynucleotide
agagatgcacaatagcccgacag

SEQ ID NO: 2191 - DNA, 23 bp, Artificial Sequence
  Synthetic polynucleotide
ctattccgtttgaatagcagaag

SEQ ID NO: 2192 - DNA, 23 bp, Artificial Sequence
  Synthetic polynucleotide
aggatcccaggactaccaggtgg

SEQ ID NO: 2193 - DNA, 23 bp, Artificial Sequence
  Synthetic polynucleotide
gatgtctccacggtacatggagg

SEQ ID NO: 2194 - DNA, 23 bp, Artificial Sequence
  Synthetic polynucleotide
aacttatcctccatgtaccgtgg

SEQ ID NO: 2195 - DNA, 23 bp, Artificial Sequence
  Synthetic polynucleotide
cttatcctccatgtaccgtggag

SEQ ID NO: 2196 - DNA, 23 bp, Artificial Sequence
  Synthetic polynucleotide
agtttgggtggaattccaggcag

SEQ ID NO: 2197 - DNA, 23 bp, Artificial Sequence
  Synthetic polynucleotide
actaaagtgacagatagtcaggg

SEQ ID NO: 2198 - DNA, 23 bp, Artificial Sequence
  Synthetic polynucleotide
tcactgcaaacacaaccctgagg

SEQ ID NO: 2199 - DNA, 23 bp, Artificial Sequence
  Synthetic polynucleotide
taggtaaacacgtgtcatggggg

SEQ ID NO: 2200 - DNA, 23 bp, Artificial Sequence
  Synthetic polynucleotide
ataggtaaacacgtgtcatgggg

SEQ ID NO: 2201 - DNA, 23 bp, Artificial Sequence
  Synthetic polynucleotide
gtttacatattattttaacgaag

SEQ ID NO: 2202 - DNA, 23 bp, Artificial Sequence
  Synthetic polynucleotide
ggtctcaaaactgaaaacgttgg

SEQ ID NO: 2203 - DNA, 23 bp, Artificial Sequence
  Synthetic polynucleotide
atttgccacatccaaccccagag

SEQ ID NO: 2204 - DNA, 23 bp, Artificial Sequence
  Synthetic polynucleotide
ttaaagttctggaagctgggaag

SEQ ID NO: 2205 - DNA, 23 bp, Artificial Sequence
  Synthetic polynucleotide
gagtgagttagatatcacaagag

SEQ ID NO: 2206 - DNA, 23 bp, Artificial Sequence
  Synthetic polynucleotide
aaaaagacggacggatcatgagg

SEQ ID NO: 2207 - DNA, 23 bp, Artificial Sequence
  Synthetic polynucleotide
tgtagtctcagctactagggagg

SEQ ID NO: 2208 - DNA, 23 bp, Artificial Sequence
  Synthetic polynucleotide
gtacagtggtacatagaccccgg

SEQ ID NO: 2209 - DNA, 23 bp, Artificial Sequence
  Synthetic polynucleotide
tactcactctttggggaccgggg

SEQ ID NO: 2210 - DNA, 23 bp, Artificial Sequence
  Synthetic polynucleotide
cagtagggagtggctatccgggg

SEQ ID NO: 2211 - DNA, 23 bp, Artificial Sequence
  Synthetic polynucleotide
tctgggaagacatcacaaggagg

SEQ ID NO: 2212 - DNA, 23 bp, Artificial Sequence
  Synthetic polynucleotide
aggcagataggcattcaaggcag

SEQ ID NO: 2213 - DNA, 23 bp, Artificial Sequence
  Synthetic polynucleotide
ccctactatgtttatcacgtagg

SEQ ID NO: 2214 - DNA, 23 bp, Artificial Sequence
  Synthetic polynucleotide
gagtgcctacgtgataaacatag

SEQ ID NO: 2215 - DNA, 23 bp, Artificial Sequence
  Synthetic polynucleotide
agagttgaatagttgcaacggag

SEQ ID NO: 2216 - DNA, 23 bp, Artificial Sequence
  Synthetic polynucleotide
accactaggctactatcaggtgg

SEQ ID NO: 2217 - DNA, 23 bp, Artificial Sequence
  Synthetic polynucleotide
tccacctgatagtagcctagtgg

SEQ ID NO: 2218 - DNA, 23 bp, Artificial Sequence
  Synthetic polynucleotide
cctagtggttgtgagtacagcag

SEQ ID NO: 2219 - DNA, 23 bp, Artificial Sequence
  Synthetic polynucleotide
tcaggaaccatatcttacgttgg

SEQ ID NO: 2220 - DNA, 23 bp, Artificial Sequence
  Synthetic polynucleotide
tctaacctccaaaagtgtgagag

SEQ ID NO: 2221 - DNA, 23 bp, Artificial Sequence
  Synthetic polynucleotide
actggcatccttactagtagagg

SEQ ID NO: 2222 - DNA, 23 bp, Artificial Sequence
  Synthetic polynucleotide
ccattttagttacttcaccgaag

SEQ ID NO: 2223 - DNA, 23 bp, Artificial Sequence
  Synthetic polynucleotide
ggagaatcacttgaaccagggag

SEQ ID NO: 2224 - DNA, 23 bp, Artificial Sequence
  Synthetic polynucleotide
ggggtgccaagaatacacaatag

SEQ ID NO: 2225 - DNA, 23 bp, Artificial Sequence
  Synthetic polynucleotide
ttataatcccagcaactcgggag

SEQ ID NO: 2226 - DNA, 23 bp, Artificial Sequence
  Synthetic polynucleotide
ggaggatcactgaagcccaagag

SEQ ID NO: 2227 - DNA, 23 bp, Artificial Sequence
  Synthetic polynucleotide
attgttagtgtatagaaacgcag

SEQ ID NO: 2228 - DNA, 23 bp, Artificial Sequence
  Synthetic polynucleotide
acagcactagaagtcctagccag

SEQ ID NO: 2229 - DNA, 23 bp, Artificial Sequence
  Synthetic polynucleotide
attgaatacgatgttagctgtgg

SEQ ID NO: 2230 - DNA, 23 bp, Artificial Sequence
  Synthetic polynucleotide
gctactataacagaataccacag

SEQ ID NO: 2231 - DNA, 23 bp, Artificial Sequence
  Synthetic polynucleotide
atggaaagttcatgactgagggg

SEQ ID NO: 2232 - DNA, 23 bp, Artificial Sequence
  Synthetic polynucleotide
gcaattgtgacagaattgggagg

SEQ ID NO: 2233 - DNA, 23 bp, Artificial Sequence
  Synthetic polynucleotide
catgtactacgaccaagtgggag

SEQ ID NO: 2234 - DNA, 23 bp, Artificial Sequence
  Synthetic polynucleotide
atcatgtactacgaccaagtggg

SEQ ID NO: 2235 - DNA, 23 bp, Artificial Sequence
  Synthetic polynucleotide
gatcatgtactacgaccaagtgg

SEQ ID NO: 2236 - DNA, 23 bp, Artificial Sequence
  Synthetic polynucleotide
ggacaactcccacttggtcgtag

SEQ ID NO: 2237 - DNA, 23 bp, Artificial Sequence
  Synthetic polynucleotide
aagggtaacaacacacactgggg

SEQ ID NO: 2238 - DNA, 23 bp, Artificial Sequence
  Synthetic polynucleotide
ctatcaacagagtaagcagacag

SEQ ID NO: 2239 - DNA, 23 bp, Artificial Sequence
  Synthetic polynucleotide
atgggtgccgcacaccaacatgg

SEQ ID NO: 2240 - DNA, 23 bp, Artificial Sequence
  Synthetic polynucleotide
gcatccctcagataaatcccaag

SEQ ID NO: 2241 - DNA, 23 bp, Artificial Sequence
  Synthetic polynucleotide
ttgaacaactcataattacgtgg

SEQ ID NO: 2242 - DNA, 23 bp, Artificial Sequence
  Synthetic polynucleotide
gtagcctaatggtttccatgggg

SEQ ID NO: 2243 - DNA, 23 bp, Artificial Sequence
  Synthetic polynucleotide
caagtacaaaaaacgatgggggg

SEQ ID NO: 2244 - DNA, 23 bp, Artificial Sequence
  Synthetic polynucleotide
atagtttctcaacccttgggaag

SEQ ID NO: 2245 - DNA, 23 bp, Artificial Sequence
  Synthetic polynucleotide
gaaaaactcatgcacaccagagg

SEQ ID NO: 2246 - DNA, 23 bp, Artificial Sequence
  Synthetic polynucleotide
tgcagcaacaccataacagtagg

SEQ ID NO: 2247 - DNA, 23 bp, Artificial Sequence
  Synthetic polynucleotide
gtaaccaaaagagagcaatgggg

SEQ ID NO: 2248 - DNA, 23 bp, Artificial Sequence
  Synthetic polynucleotide
attgcctcatgataaccacaagg

SEQ ID NO: 2249 - DNA, 23 bp, Artificial Sequence
  Synthetic polynucleotide
catggtaaagagcaacacaagag

SEQ ID NO: 2250 - DNA, 23 bp, Artificial Sequence
  Synthetic polynucleotide
gctcttttaaagtttccactgag

SEQ ID NO: 2251 - DNA, 23 bp, Artificial Sequence
  Synthetic polynucleotide
tgaagtttagcaaagtaccagag

SEQ ID NO: 2252 - DNA, 23 bp, Artificial Sequence
  Synthetic polynucleotide
aaagggataaaagaaatccgcag

SEQ ID NO: 2253 - DNA, 23 bp, Artificial Sequence
  Synthetic polynucleotide
gcatgccaagaacttgacagaag

SEQ ID NO: 2254 - DNA, 23 bp, Artificial Sequence
  Synthetic polynucleotide
cttatgagtgagaacatgcagag

SEQ ID NO: 2255 - DNA, 23 bp, Artificial Sequence
  Synthetic polynucleotide
cctcacaaaaacaagcaacgggg

SEQ ID NO: 2256 - DNA, 23 bp, Artificial Sequence
  Synthetic polynucleotide
tcaagtgatttcgcccacctcgg

SEQ ID NO: 2257 - DNA, 23 bp, Artificial Sequence
  Synthetic polynucleotide
gtaggaacacttgaagccaggag

SEQ ID NO: 2258 - DNA, 23 bp, Artificial Sequence
  Synthetic polynucleotide
caggagttctagatcagcctggg

SEQ ID NO: 2259 - DNA, 23 bp, Artificial Sequence
  Synthetic polynucleotide
ccaaagtgatgggattgcagggg

SEQ ID NO: 2260 - DNA, 23 bp, Artificial Sequence
  Synthetic polynucleotide
ataagaactgagctttagagaag

SEQ ID NO: 2261 - DNA, 23 bp, Artificial Sequence
  Synthetic polynucleotide
agttcttatatagcaaaccggag

SEQ ID NO: 2262 - DNA, 23 bp, Artificial Sequence
  Synthetic polynucleotide
aagactgatgaatccagccaggg

SEQ ID NO: 2263 - DNA, 23 bp, Artificial Sequence
  Synthetic polynucleotide
atccaagtcattagtcttggggg

SEQ ID NO: 2264 - DNA, 23 bp, Artificial Sequence
  Synthetic polynucleotide
ataagatggtcacagcttggggg

SEQ ID NO: 2265 - DNA, 23 bp, Artificial Sequence
  Synthetic polynucleotide
ctcccatatttagcccaatgggg

SEQ ID NO: 2266 - DNA, 23 bp, Artificial Sequence
  Synthetic polynucleotide
tcctgcctcagccttccgaggag

SEQ ID NO: 2267 - DNA, 23 bp, Artificial Sequence
  Synthetic polynucleotide
ggagaatcgcttgaacccaggag

SEQ ID NO: 2268 - DNA, 23 bp, Artificial Sequence
  Synthetic polynucleotide
ttgagtcctagataggtgggtgg

SEQ ID NO: 2269 - DNA, 23 bp, Artificial Sequence
  Synthetic polynucleotide
gactcaagatcctagataggtgg

SEQ ID NO: 2270 - DNA, 23 bp, Artificial Sequence
  Synthetic polynucleotide
tgagtcctagataggtgggtggg

SEQ ID NO: 2271 - DNA, 23 bp, Artificial Sequence
  Synthetic polynucleotide
gactcaagatcctagataggtgg

SEQ ID NO: 2272 - DNA, 23 bp, Artificial Sequence
  Synthetic polynucleotide
aaattgggctgggaccacttagg

SEQ ID NO: 2273 - DNA, 23 bp, Artificial Sequence
  Synthetic polynucleotide
gactcaagatcctagataggtgg

SEQ ID NO: 2274 - DNA, 23 bp, Artificial Sequence
  Synthetic polynucleotide
tgcatgaaaacctatcccctggg

SEQ ID NO: 2275 - DNA, 23 bp, Artificial Sequence
  Synthetic polynucleotide
tgggagatcaacatgcctagtgg

SEQ ID NO: 2276 - DNA, 23 bp, Artificial Sequence
  Synthetic polynucleotide
aattacctcccacagcagcacag

SEQ ID NO: 2277 - DNA, 23 bp, Artificial Sequence
  Synthetic polynucleotide
gtattaccacttcgtgaaaagag

SEQ ID NO: 2278 - DNA, 23 bp, Artificial Sequence
  Synthetic polynucleotide
acaggttactcaaaagcccagag

SEQ ID NO: 2279 - DNA, 23 bp, Artificial Sequence
  Synthetic polynucleotide
gtattaccacttcgtgaaaagag

SEQ ID NO: 2280 - DNA, 23 bp, Artificial Sequence
  Synthetic polynucleotide
ggttactcaaaagcccagaggag

SEQ ID NO: 2281 - DNA, 23 bp, Artificial Sequence
  Synthetic polynucleotide
gtattaccacttcgtgaaaagag

SEQ ID NO: 2282 - DNA, 23 bp, Artificial Sequence
  Synthetic polynucleotide
tagatacccatcttatacacagg

SEQ ID NO: 2283 - DNA, 23 bp, Artificial Sequence
  Synthetic polynucleotide
gtctttaactatcatccatgtgg

SEQ ID NO: 2284 - DNA, 23 bp, Artificial Sequence
  Synthetic polynucleotide
tagatacccatcttatacacagg

SEQ ID NO: 2285 - DNA, 23 bp, Artificial Sequence
  Synthetic polynucleotide
taactatcatccatgtggaaggg

SEQ ID NO: 2286 - DNA, 23 bp, Artificial Sequence
  Synthetic polynucleotide
tttgcacaaaggattgtaggtgg

SEQ ID NO: 2287 - DNA, 23 bp, Artificial Sequence
  Synthetic polynucleotide
caagataccaaactaagaggtgg

SEQ ID NO: 2288 - DNA, 23 bp, Artificial Sequence
  Synthetic polynucleotide
tagctgagatccactcccctcgg

SEQ ID NO: 2289 - DNA, 23 bp, Artificial Sequence
  Synthetic polynucleotide
gatgtttgcttgagcccctgggg

SEQ ID NO: 2290 - DNA, 23 bp, Artificial Sequence
  Synthetic polynucleotide
ctttttcaatgaggaaaccgtgg

SEQ ID NO: 2291 - DNA, 23 bp, Artificial Sequence
  Synthetic polynucleotide
tataatcccagcactttgggagg

SEQ ID NO: 2292 - DNA, 23 bp, Artificial Sequence
  Synthetic polynucleotide
aataggagacatagttcctgagg

SEQ ID NO: 2293 - DNA, 23 bp, Artificial Sequence
  Synthetic polynucleotide
cactggtgaggaagttacacggg

SEQ ID NO: 2294 - DNA, 23 bp, Artificial Sequence
  Synthetic polynucleotide
aataggagacatagttcctgagg

SEQ ID NO: 2295 - DNA, 23 bp, Artificial Sequence
  Synthetic polynucleotide
acgggtagtctgttagaaagagg

SEQ ID NO: 2296 - DNA, 23 bp, Artificial Sequence
  Synthetic polynucleotide
ttagagccaaaggagcaagtaag

SEQ ID NO: 2297 - DNA, 23 bp, Artificial Sequence
  Synthetic polynucleotide
ttacactgtaaacggcctgagag

SEQ ID NO: 2298 - DNA, 23 bp, Artificial Sequence
  Synthetic polynucleotide
ctcagcttaatcgattttggggg

SEQ ID NO: 2299 - DNA, 23 bp, Artificial Sequence
  Synthetic polynucleotide
tagaccacaatttcacctggagg

SEQ ID NO: 2300 - DNA, 23 bp, Artificial Sequence
  Synthetic polynucleotide
taagggaacaccaaaagcacagg

SEQ ID NO: 2301 - DNA, 23 bp, Artificial Sequence
  Synthetic polynucleotide
tagccaaacctgctagaaagagg

SEQ ID NO: 2302 - DNA, 23 bp, Artificial Sequence
  Synthetic polynucleotide
ctatgcttctgaaagttagcaag

SEQ ID NO: 2303 - DNA, 23 bp, Artificial Sequence
  Synthetic polynucleotide
gcatagttactggagtgaggcag

SEQ ID NO: 2304 - DNA, 23 bp, Artificial Sequence
  Synthetic polynucleotide
ctatgcttctgaaagttagcaag

SEQ ID NO: 2305 - DNA, 23 bp, Artificial Sequence
  Synthetic polynucleotide
gcatagttactggagtgaggcag

SEQ ID NO: 2306 - DNA, 23 bp, Artificial Sequence
  Synthetic polynucleotide
tgtacatagacccagcacaaggg

SEQ ID NO: 2307 - DNA, 23 bp, Artificial Sequence
  Synthetic polynucleotide
agctatagtagaatcctgtgtgg

SEQ ID NO: 2308 - DNA, 23 bp, Artificial Sequence
  Synthetic polynucleotide
tccatcaccactacacacaatgg

SEQ ID NO: 2309 - DNA, 23 bp, Artificial Sequence
  Synthetic polynucleotide
cagagccttgacacctgccgtgg

SEQ ID NO: 2310 - DNA, 23 bp, Artificial Sequence
  Synthetic polynucleotide
gatctgtttataggccacagtgg

SEQ ID NO: 2311 - DNA, 23 bp, Artificial Sequence
  Synthetic polynucleotide
tctgtggcttatacaactggggg

SEQ ID NO: 2312 - DNA, 23 bp, Artificial Sequence
  Synthetic polynucleotide
gatctgtttataggccacagtgg

SEQ ID NO: 2313 - DNA, 23 bp, Artificial Sequence
  Synthetic polynucleotide
atctgtggcttatacaactgggg

SEQ ID NO: 2314 - DNA, 23 bp, Artificial Sequence
  Synthetic polynucleotide
cagtgacagatactggtccatgg

SEQ ID NO: 2315 - DNA, 23 bp, Artificial Sequence
  Synthetic polynucleotide
acccctgatctaacccactgtgg

SEQ ID NO: 2316 - DNA, 23 bp, Artificial Sequence
  Synthetic polynucleotide
tattgtgaactgcacatacgagg

SEQ ID NO: 2317 - DNA, 23 bp, Artificial Sequence
  Synthetic polynucleotide
gccaaggctgatctaacaggagg

SEQ ID NO: 2318 - DNA, 23 bp, Artificial Sequence
  Synthetic polynucleotide
tattgtgaactgcacatacgagg

SEQ ID NO: 2319 - DNA, 23 bp, Artificial Sequence
  Synthetic polynucleotide
tctctgagagtctaatgccaagg

SEQ ID NO: 2320 - DNA, 23 bp, Artificial Sequence
  Synthetic polynucleotide
attgtgaactgcacatacgaggg

SEQ ID NO: 2321 - DNA, 23 bp, Artificial Sequence
  Synthetic polynucleotide
gccaaggctgatctaacaggagg

SEQ ID NO: 2322 - DNA, 23 bp, Artificial Sequence
  Synthetic polynucleotide
attgtgaactgcacatacgaggg

SEQ ID NO: 2323 - DNA, 23 bp, Artificial Sequence
  Synthetic polynucleotide
tctctgagagtctaatgccaagg

SEQ ID NO: 2324 - DNA, 23 bp, Artificial Sequence
  Synthetic polynucleotide
aatggtgcagatagtaaggacag

SEQ ID NO: 2325 - DNA, 23 bp, Artificial Sequence
  Synthetic polynucleotide
ataaatctattccaagacaaaag

SEQ ID NO: 2326 - DNA, 23 bp, Artificial Sequence
  Synthetic polynucleotide
gagaggttatgtcatctccacag

SEQ ID NO: 2327 - DNA, 23 bp, Artificial Sequence
  Synthetic polynucleotide
gagttaataatcatgctccgaag

SEQ ID NO: 2328 - DNA, 23 bp, Artificial Sequence
  Synthetic polynucleotide
aaaatggacatggataccctagg

SEQ ID NO: 2329 - DNA, 23 bp, Artificial Sequence
  Synthetic polynucleotide
cattttagctagaaccagggtgg

SEQ ID NO: 2330 - DNA, 23 bp, Artificial Sequence
  Synthetic polynucleotide
aaaatggacatggataccctagg

SEQ ID NO: 2331 - DNA, 23 bp, Artificial Sequence
  Synthetic polynucleotide
gtccattttagctagaaccaggg

SEQ ID NO: 2332 - DNA, 23 bp, Artificial Sequence
  Synthetic polynucleotide
gtcactcaagagctctaacggag

SEQ ID NO: 2333 - DNA, 23 bp, Artificial Sequence
  Synthetic polynucleotide
ccaggcacattgtcaataggcag

SEQ ID NO: 2334 - DNA, 23 bp, Artificial Sequence
  Synthetic polynucleotide
agctctaacggagaggtacaagg

SEQ ID NO: 2335 - DNA, 23 bp, Artificial Sequence
  Synthetic polynucleotide
gttagagctcttgagtgaccagg

SEQ ID NO: 2336 - DNA, 23 bp, Artificial Sequence
  Synthetic polynucleotide
gctctaacggagaggtacaaggg

SEQ ID NO: 2337 - DNA, 23 bp, Artificial Sequence
  Synthetic polynucleotide
gttagagctcttgagtgaccagg

SEQ ID NO: 2338 - DNA, 23 bp, Artificial Sequence
  Synthetic polynucleotide
tttgggttactgtagccttgtag

SEQ ID NO: 2339 - DNA, 23 bp, Artificial Sequence
  Synthetic polynucleotide
gcatggtactggtaccaaaacag

SEQ ID NO: 2340 - DNA, 23 bp, Artificial Sequence
  Synthetic polynucleotide
acttacctcctgaatacggtgag

SEQ ID NO: 2341 - DNA, 23 bp, Artificial Sequence
  Synthetic polynucleotide
ggctttttatttgtatgcggcag

SEQ ID NO: 2342 - DNA, 23 bp, Artificial Sequence
  Synthetic polynucleotide
ttttgaggtcacatatgatgggg

SEQ ID NO: 2343 - DNA, 23 bp, Artificial Sequence
  Synthetic polynucleotide
gatggaaaagaggttaggcaggg

SEQ ID NO: 2344 - DNA, 23 bp, Artificial Sequence
  Synthetic polynucleotide
gacagctccaccgaaacaggagg

SEQ ID NO: 2345 - DNA, 23 bp, Artificial Sequence
  Synthetic polynucleotide
tttactctttcactttcacgagg

SEQ ID NO: 2346 - DNA, 23 bp, Artificial Sequence
  Synthetic polynucleotide
taccaggcccatccttcccgagg

SEQ ID NO: 2347 - DNA, 23 bp, Artificial Sequence
  Synthetic polynucleotide
gggcctggtagagtgagtatggg

SEQ ID NO: 2348 - DNA, 23 bp, Artificial Sequence
  Synthetic polynucleotide
ggtttgtataagtgcaccctagg

SEQ ID NO: 2349 - DNA, 23 bp, Artificial Sequence
  Synthetic polynucleotide
gtataggctaccatacacctagg

SEQ ID NO: 2350 - DNA, 23 bp, Artificial Sequence
  Synthetic polynucleotide
caccctaggatgtttgcacaagg

SEQ ID NO: 2351 - DNA, 23 bp, Artificial Sequence
  Synthetic polynucleotide
gtataggctaccatacacctagg

SEQ ID NO: 2352 - DNA, 23 bp, Artificial Sequence
  Synthetic polynucleotide
ataggcgagcacatgaaaagagg

SEQ ID NO: 2353 - DNA, 23 bp, Artificial Sequence
  Synthetic polynucleotide
tatgcccttcgacaccaaggtgg

SEQ ID NO: 2354 - DNA, 23 bp, Artificial Sequence
  Synthetic polynucleotide
tgctaaatgtgtatcacccgagg

SEQ ID NO: 2355 - DNA, 23 bp, Artificial Sequence
  Synthetic polynucleotide
tttgggtggtacctgattggggg

SEQ ID NO: 2356 - DNA, 23 bp, Artificial Sequence
  Synthetic polynucleotide
tgctaaatgtgtatcacccgagg

SEQ ID NO: 2357 - DNA, 23 bp, Artificial Sequence
  Synthetic polynucleotide
atttgggtggtacctgattgggg

SEQ ID NO: 2358 - DNA, 23 bp, Artificial Sequence
  Synthetic polynucleotide
ataattctgcacaaatccccaag

SEQ ID NO: 2359 - DNA, 23 bp, Artificial Sequence
  Synthetic polynucleotide
ttataagcagggaggcctgagag

SEQ ID NO: 2360 - DNA, 23 bp, Artificial Sequence
  Synthetic polynucleotide
gtaacatcagccaagccagtagg

SEQ ID NO: 2361 - DNA, 23 bp, Artificial Sequence
  Synthetic polynucleotide
ttactgctgcgtcgctcctgggg

SEQ ID NO: 2362 - DNA, 23 bp, Artificial Sequence
  Synthetic polynucleotide
taggtccccaccaatgctgccgg

SEQ ID NO: 2363 - DNA, 23 bp, Artificial Sequence
  Synthetic polynucleotide
ttactgctgcgtcgctcctgggg

SEQ ID NO: 2364 - DNA, 23 bp, Artificial Sequence
  Synthetic polynucleotide
tgctgtggactgcaacggtgtgg

SEQ ID NO: 2365 - DNA, 23 bp, Artificial Sequence
  Synthetic polynucleotide
gttcaccggcagcattggtgggg

SEQ ID NO: 2366 - DNA, 23 bp, Artificial Sequence
  Synthetic polynucleotide
tgctgtggactgcaacggtgtgg

SEQ ID NO: 2367 - DNA, 23 bp, Artificial Sequence
  Synthetic polynucleotide
ttggtggggacctactggcttgg

SEQ ID NO: 2368 - DNA, 23 bp, Artificial Sequence
  Synthetic polynucleotide
tgcattaccaatatcagcaaggg

SEQ ID NO: 2369 - DNA, 23 bp, Artificial Sequence
  Synthetic polynucleotide
tgcagcatagcatagtgagtggg

SEQ ID NO: 2370 - DNA, 23 bp, Artificial Sequence
  Synthetic polynucleotide
tgcattaccaatatcagcaaggg

SEQ ID NO: 2371 - DNA, 23 bp, Artificial Sequence
  Synthetic polynucleotide
atgcagcatagcatagtgagtgg

SEQ ID NO: 2372 - DNA, 23 bp, Artificial Sequence
  Synthetic polynucleotide
gtaagagacaaccattacaggag

SEQ ID NO: 2373 - DNA, 23 bp, Artificial Sequence
  Synthetic polynucleotide
ggaagacctcatgaactgagcag

SEQ ID NO: 2374 - DNA, 23 bp, Artificial Sequence
  Synthetic polynucleotide
cccccacattcccattgtggggg

SEQ ID NO: 2375 - DNA, 23 bp, Artificial Sequence
  Synthetic polynucleotide
gacctggggcatattgtcagggg

SEQ ID NO: 2376 - DNA, 23 bp, Artificial Sequence
  Synthetic polynucleotide
cccccacattcccattgtggggg

SEQ ID NO: 2377 - DNA, 23 bp, Artificial Sequence
  Synthetic polynucleotide
ggggtgaagtgttagacccaggg

SEQ ID NO: 2378 - DNA, 23 bp, Artificial Sequence
  Synthetic polynucleotide
cccccacattcccattgtggggg

SEQ ID NO: 2379 - DNA, 23 bp, Artificial Sequence
  Synthetic polynucleotide
gttagacccagggaccaggtggg

SEQ ID NO: 2380 - DNA, 23 bp, Artificial Sequence
  Synthetic polynucleotide
taagactagcctctatagcaagg

SEQ ID NO: 2381 - DNA, 23 bp, Artificial Sequence
  Synthetic polynucleotide
ttacacatggctataaggtgcgg

SEQ ID NO: 2382 - DNA, 23 bp, Artificial Sequence
  Synthetic polynucleotide
tctctcatcaggtatccagaagg

SEQ ID NO: 2383 - DNA, 23 bp, Artificial Sequence
  Synthetic polynucleotide
ccaactgtgacaagtcaacgtgg

SEQ ID NO: 2384 - DNA, 23 bp, Artificial Sequence
  Synthetic polynucleotide
gttatctcaaaggtacccatgag

SEQ ID NO: 2385 - DNA, 23 bp, Artificial Sequence
  Synthetic polynucleotide
cactgactatctcttcagagaag

SEQ ID NO: 2386 - DNA, 23 bp, Artificial Sequence
  Synthetic polynucleotide
ggagaagggtataaccttggggg

SEQ ID NO: 2387 - DNA, 23 bp, Artificial Sequence
  Synthetic polynucleotide
cctgcatccaatgaatggtgtgg

SEQ ID NO: 2388 - DNA, 23 bp, Artificial Sequence
  Synthetic polynucleotide
agaccaccgtccagaaagaagag

SEQ ID NO: 2389 - DNA, 23 bp, Artificial Sequence
  Synthetic polynucleotide
ggattattctctctggacagtag

SEQ ID NO: 2390 - DNA, 23 bp, Artificial Sequence
  Synthetic polynucleotide
agaccaccgtccagaaagaagag

SEQ ID NO: 2391 - DNA, 23 bp, Artificial Sequence
  Synthetic polynucleotide
tctggattattctctctggacag

SEQ ID NO: 2392 - DNA, 23 bp, Artificial Sequence
  Synthetic polynucleotide
agagatgcacaatagcccgacag

SEQ ID NO: 2393 - DNA, 23 bp, Artificial Sequence
  Synthetic polynucleotide
ggattattctctctggacagtag

SEQ ID NO: 2394 - DNA, 23 bp, Artificial Sequence
  Synthetic polynucleotide
agagatgcacaatagcccgacag

SEQ ID NO: 2395 - DNA, 23 bp, Artificial Sequence
  Synthetic polynucleotide
tctggattattctctctggacag

SEQ ID NO: 2396 - DNA, 23 bp, Artificial Sequence
  Synthetic polynucleotide
tcagggtctagaaagacgaacag

SEQ ID NO: 2397 - DNA, 23 bp, Artificial Sequence
  Synthetic polynucleotide
tacgtttctgaaattgcaagcag

SEQ ID NO: 2398 - DNA, 23 bp, Artificial Sequence
  Synthetic polynucleotide
tcactgcaaacacaaccctgagg

SEQ ID NO: 2399 - DNA, 23 bp, Artificial Sequence
  Synthetic polynucleotide
gcaaccttgagacatgaggtagg

SEQ ID NO: 2400 - DNA, 23 bp, Artificial Sequence
  Synthetic polynucleotide
tcactgcaaacacaaccctgagg

SEQ ID NO: 2401 - DNA, 23 bp, Artificial Sequence
  Synthetic polynucleotide
gtgagcaaccttgagacatgagg

SEQ ID NO: 2402 - DNA, 23 bp, Artificial Sequence
  Synthetic polynucleotide
gtttacatattattttaacgaag

SEQ ID NO: 2403 - DNA, 23 bp, Artificial Sequence
  Synthetic polynucleotide
tccatcatccaagtattcaacag

SEQ ID NO: 2404 - DNA, 23 bp, Artificial Sequence
  Synthetic polynucleotide
aatcattgtaacaagccctacag

SEQ ID NO: 2405 - DNA, 23 bp, Artificial Sequence
  Synthetic polynucleotide
atttgccacatccaaccccagag

SEQ ID NO: 2406 - DNA, 23 bp, Artificial Sequence
  Synthetic polynucleotide
ttgctggtgggcacaccagagag

SEQ ID NO: 2407 - DNA, 23 bp, Artificial Sequence
  Synthetic polynucleotide
accagcaagaaagttcccaccag

SEQ ID NO: 2408 - DNA, 23 bp, Artificial Sequence
  Synthetic polynucleotide
ctatattccattcatgaaggcag

SEQ ID NO: 2409 - DNA, 23 bp, Artificial Sequence
  Synthetic polynucleotide
gagtgagttagatatcacaagag

SEQ ID NO: 2410 - DNA, 23 bp, Artificial Sequence
  Synthetic polynucleotide
tgtagtctcagctactagggagg

SEQ ID NO: 2411 - DNA, 23 bp, Artificial Sequence
  Synthetic polynucleotide
aggtgagcaccactatgcccggg

SEQ ID NO: 2412 - DNA, 23 bp, Artificial Sequence
  Synthetic polynucleotide
cactcccatcaacagtgtgtagg

SEQ ID NO: 2413 - DNA, 23 bp, Artificial Sequence
  Synthetic polynucleotide
aaccataatggaagactgtgtgg

SEQ ID NO: 2414 - DNA, 23 bp, Artificial Sequence
  Synthetic polynucleotide
gtagcctaatggtttccatgggg

SEQ ID NO: 2415 - DNA, 23 bp, Artificial Sequence
  Synthetic polynucleotide
cgttttccagccgctccctgtgg

SEQ ID NO: 2416 - DNA, 23 bp, Artificial Sequence
  Synthetic polynucleotide
catgaccctgtagatactgaagg

SEQ ID NO: 2417 - DNA, 23 bp, Artificial Sequence
  Synthetic polynucleotide
tcatggtttcagaaccccaaggg

SEQ ID NO: 2418 - DNA, 23 bp, Artificial Sequence
  Synthetic polynucleotide
tttcagtccccattaatgaacag

SEQ ID NO: 2419 - DNA, 23 bp, Artificial Sequence
  Synthetic polynucleotide
gcatgccaagaacttgacagaag

SEQ ID NO: 2420 - DNA, 23 bp, Artificial Sequence
  Synthetic polynucleotide
tttcagtccccattaatgaacag

SEQ ID NO: 2421 - DNA, 23 bp, Artificial Sequence
  Synthetic polynucleotide
acagcatgccaagaacttgacag

SEQ ID NO: 2422 - DNA, 23 bp, Artificial Sequence
  Synthetic polynucleotide
ttttggttactgtagccttgtag

SEQ ID NO: 2423 - DNA, 23 bp, Artificial Sequence
  Synthetic polynucleotide
gcatggtactggtaccaaaacag

SEQ ID NO: 2424 - DNA, 23 bp, Artificial Sequence
  Synthetic polynucleotide
catgacctgccaacatgctgggg

SEQ ID NO: 2425 - DNA, 23 bp, Artificial Sequence
  Synthetic polynucleotide
caggagtttgagactagcctggg

SEQ ID NO: 2426 - protein, 1368 aa, S. pyogenes
MDKKYSIGLAIGTNSVGWAVITDEYKVPSKKFKVLGNTDRHSIKKNLIGALLFDSGETAEATRLKRTARRRYTRRKNRICYLQEIFSNEMAKVDDSFFHRLEESFLVEEDKKHERHPIFGNIVDEVAYHEKYPTIYHLRKKLVDSTDKADLRLIYLALAHMIKFRGHFLIEGDLNPDNSDVDKLFIQLVQTYNQLFEENPINASGVDAKAILSARLSKSRRLENLIAQLPGEKKNGLFGNLIALSLGLTPNFKSNFDLAEDAKLQLSKDTYDDDLDNLLAQIGDQYADLFLAAKNLSDAILLSDILRVNTEITKAPLSASMIKRYDEHHQDLTLLKALVRQQLPEKYKEIFFDQSKNGYAGYIDGGASQEEFYKFIKPILEKMDGTEELLVKLNREDLLRKQRTFDNGSIPHQIHLGELHAILRRQEDFYPFLKDNREKIEKILTFRIPYYVGPLARGNSRFAWMTRKSEETITPWNFEEVVDKGASAQSFIERMTNFDKNLPNEKVLPKHSLLYEYFTVYNELTKVKYVTEGMRKPAFLSGEQKKAIVDLLFKTNRKVTVKQLKEDYFKKIECFDSVEISGVEDRFNASLGTYHDLLKIIKDKDFLDNEENEDILEDIVLTLTLFEDREMIEERLKTYAHLFDDKVMKQLKRRRYTGWGRLSRKLINGIRDKQSGKTILDFLKSDGFANRNFMQLIHDDSLTFKEDIQKAQVSGQGDSLHEHIANLAGSPAIKKGILQTVKVVDELVKVMGRHKPENIVIEMARENQTTQKGQKNSRERMKRIEEGIKELGSQILKEHPVENTQLQNEKLYLYYLQNGRDMYVDQELDINRLSDYDVDHIVPQSFLKDDSIDNKVLTRSDKNRGKSDNVPSEEVVKKMKNYWRQLLNAKLITQRKFDNLTKAERGGLSELDKAGFIKRQLVETRQITKHVAQILDSRMNTKYDENDKLIREVKVITLKSKLVSDFRKDFQFYKVREINNYHHAHDAYLNAVVGTALIKKYPKLESEFVYGDYKVYDVRKMIAKSEQEIGKATAKYFFYSNIMNFFKTEITLANGEIRKRPLIETNGETGEIVWDKGRDFATVRKVLSMPQVNIVKKTEVQTGGFSKESILPKRNSDKLIARKKDWDPKKYGGFVSPTVAYSVLVVAKVEKGKSKKLKSVKELLGITIMERSSFEKNPIDFLEAKGYKEVKKDLIIKLPKYSLFELENGRKRMLASARELQKGNELALPSKYVNFLYLASHYEKLKGSPEDNEQKQLFVEQHKHYLDEIIEQISEFSKRVILADANLDKVLSAYNKHRDKPIREQAENIIHLFTLTNLGAPAAFKYFDTTIDRKEYRSTKEVLDATLIHQSITGLYETRIDLSQLGGD

SEQ ID NO: 2427 - protein, 1368 aa, S. pyogenes
MDKKYSIGLAIGTNSVGWAVITDEYKVPSKKFKVLGNTDRHSIKKNLIGALLFDSGETAEATRLKRTARRRYTRRKNRICYLQEIFSNEMAKVDDSFFHRLEESFLVEEDKKHERHPIFGNIVDEVAYHEKYPTIYHLRKKLVDSTDKADLRLIYLALAHMIKFRGHFLIEGDLNPDNSDVDKLFIQLVQTYNQLFEENPINASGVDAKAILSARLSKSRRLENLIAQLPGEKKNGLFGNLIALSLGLTPNFKSNFDLAEDAKLQLSKDTYDDDLDNLLAQIGDQYADLFLAAKNLSDAILLSDILRVNTEITKAPLSASMIKRYDEHHQDLTLLKALVRQQLPEKYKEIFFDQSKNGYAGYIDGGASQEEFYKFIKPILEKMDGTEELLVKLNREDLLRKQRTFDNGSIPHQIHLGELHAILRRQEDFYPFLKDNREKIEKILTFRIPYYVGPLARGNSRFAWMTRKSEETITPWNFEEVVDKGASAQSFIERMTNFDKNLPNEKVLPKHSLLYEYFTVYNELTKVKYVTEGMRKPAFLSGEQKKAIVDLLFKTNRKVTVKQLKEDYFKKIECFDSVEISGVEDRFNASLGTYHDLLKIIKDKDFLDNEENEDILEDIVLTLTLFEDREMIEERLKTYAHLFDDKVMKQLKRRRYTGWGRLSRKLINGIRDKQSGKTILDFLKSDGFANRNFMQLIHDDSLTFKEDIQKAQVSGQGDSLHEHIANLAGSPAIKKGILQTVKVVDELVKVMGRHKPENIVIEMARENQTTQKGQKNSRERMKRIEEGIKELGSQILKEHPVENTQLQNEKLYLYYLQNGRDMYVDQELDINRLSDYDVDHIVPQSFLKDDSIDNKVLTRSDKNRGKSDNVPSEEVVKKMKNYWRQLLNAKLITQRKFDNLTKAERGGLSELDKAGFIKRQLVETRQITKHVAQILDSRMNTKYDENDKLIREVKVITLKSKLVSDFRKDFQFYKVREINNYHHAHDAYLNAVVGTALIKKYPKLESEFVYGDYKVYDVRKMIAKSEQEIGKATAKYFFYSNIMNFFKTEITLANGEIRKRPLIETNGETGEIVWDKGRDFATVRKVLSMPQVNIVKKTEVQTGGFSKESILPKRNSDKLIARKKDWDPKKYGGFVSPTVAYSVLVVAKVEKGKSKKLKSVKELLGITIMERSSFEKNPIDFLEAKGYKEVKKDLIIKLPKYSLFELENGRKRMLASAGELQKGNELALPSKYVNFLYLASHYEKLKGSPEDNEQKQLFVEQHKHYLDEIIEQISEFSKRVILADANLDKVLSAYNKHRDKPIREQAENIIHLFTLTNLGAPAAFKYFDTTIDRKQYRSTKEVLDATLIHQSITGLYETRIDLSQLGGD

SEQ ID NO: 2428 - protein, 1368 aa, S. pyogenes
MDKKYSIGLAIGTNSVGWAVITDEYKVPSKKFKVLGNTDRHSIKKNLIGALLFDSGETAEATRLKRTARRRYTRRKNRICYLQEIFSNEMAKVDDSFFHRLEESFLVEEDKKHERHPIFGNIVDEVAYHEKYPTIYHLRKKLVDSTDKADLRLIYLALAHMIKFRGHFLIEGDLNPDNSDVDKLFIQLVQTYNQLFEENPINASGVDAKAILSARLSKSRRLENLIAQLPGEKKNGLFGNLIALSLGLTPNFKSNFDLAEDAKLQLSKDTYDDDLDNLLAQIGDQYADLFLAAKNLSDAILLSDILRVNTEITKAPLSASMIKRYDEHHQDLTLLKALVRQQLPEKYKEIFFDQSKNGYAGYIDGGASQEEFYKFIKPILEKMDGTEELLVKLNREDLLRKQRTFDNGSIPHQIHLGELHAILRRQEDFYPFLKDNREKIEKILTFRIPYYVGPLARGNSRFAWMTRKSEETITPWNFEEVVDKGASAQSFIERMTNFDKNLPNEKVLPKHSLLYEYFTVYNELTKVKYVTEGMRKPAFLSGEQKKAIVDLLFKTNRKVTVKQLKEDYFKKIECFDSVEISGVEDRFNASLGTYHDLLKIIKDKDFLDNEENEDILEDIVLTLTLFEDREMIEERLKTYAHLFDDKVMKQLKRRRYTGWGRLSRKLINGIRDKQSGKTILDFLKSDGFANRNFMQLIHDDSLTFKEDIQKAQVSGQGDSLHEHIANLAGSPAIKKGILQTVKVVDELVKVMGRHKPENIVIEMARENQTTQKGQKNSRERMKRIEEGIKELGSQILKEHPVENTQLQNEKLYLYYLQNGRDMYVDQELDINRLSDYDVDHIVPQSFLKDDSIDNKVLTRSDKNRGKSDNVPSEEVVKKMKNYWRQLLNAKLITQRKFDNLTKAERGGLSELDKAGFIKRQLVETRQITKHVAQILDSRMNTKYDENDKLIREVKVITLKSKLVSDFRKDFQFYKVREINNYHHAHDAYLNAVVGTALIKKYPKLESEFVYGDYKVYDVRKMIAKSEQEIGKATAKYFFYSNIMNFFKTEITLANGEIRKRPLIETNGETGEIVWDKGRDFATVRKVLSMPQVNIVKKTEVQTGGFSKESILPKRNSDKLIARKKDWDPKKYGGFESPTVAYSVLVVAKVEKGKSKKLKSVKELLGITIMERSSFEKNPIDFLEAKGYKEVKKDLIIKLPKYSLFELENGRKRMLASAGELQKGNELALPSKYVNFLYLASHYEKLKGSPEDNEQKQLFVEQHKHYLDEIIEQISEFSKRVILADANLDKVLSAYNKHRDKPIREQAENIIHLFTLTNLGAPAAFKYFDTTIDRKQYRSTKEVLDATLIHQSITGLYETRIDLSQLGGD

SEQ ID NO: 2429 - protein, 1388 aa, Streptococcus thermophilus
MTKPYSIGLAIGTNSVGWAVITDNYKVPSKKMKVLGNTSKKYIKKNLLGVLLFDSGITAEGRRLKRTARRRYTRRRNRILYLQEIFSTEMATLDDAFFQRLDDSFLVPDDKRDSKYPIFGNLVEEKVYHDEFPTIYHLRKYLADSTKKADLRLVYLALAHMIKYRGHFLIEGEFNSKNNDIQKNFQDFLDTYNAIFESDLSLENSKQLEEIVKDKISKLEKKDRILKLFPGEKNSGIFSEFLKLIVGNQADFRKCFNLDEKASLHFSKESYDEDLETLLGYIGDDYSDVFLKAKKLYDAILLSGFLTVTDNETEAPLSSAMIKRYNEHKEDLALLKEYIRNISLKTYNEVFKDDTKNGYAGYIDGKTNQEDFYVYLKNLLAEFEGADYFLEKIDREDFLRKQRTFDNGSIPYQIHLQEMRAILDKQAKFYPFLAKNKERIEKILTFRIPYYVGPLARGNSDFAWSIRKRNEKITPWNFEDVIDKESSAEAFINRMTSFDLYLPEEKVLPKHSLLYETFNVYNELTKVRFIAESMRDYQFLDSKQKKDIVRLYFKDKRKVTDKDIIEYLHAIYGYDGIELKGIEKQFNSSLSTYHDLLNIINDKEFLDDSSNEAIIEEIIHTLTIFEDREMIKQRLSKFENIFDKSVLKKLSRRHYTGWGKLSAKLINGIRDEKSGNTILDYLIDDGISNRNFMQLIHDDALSFKKKIQKAQIIGDEDKGNIKEVVKSLPGSPAIKKGILQSIKIVDELVKVMGGRKPESIVVEMARENQYTNQGKSNSQQRLKRLEKSLKELGSKILKENIPAKLSKIDNNALQNDRLYLYYLQNGKDMYTGDDLDIDRLSNYDIDHIIPQAFLKDNSIDNKVLVSSASNRGKSDDFPSLEVVKKRKTFWYQLLKSKLISQRKFDNLTKAERGGLLPEDKAGFIQRQLVETRQITKHVARLLDEKFNNKKDENNRAVRTVKIITLKSTLVSQFRKDFELYKVREINDFHHAHDAYLNAVIASALLKKYPKLEPEFVYGDYPKYNSFRERKSATEKVYFYSNIMNIFKKSISLADGRVIERPLIEVNEETGESVWNKESDLATVRRVLSYPQVNVVKKVEEQNHGLDRGKPKGLFNANLSSKPKPNSNENLVGAKEYLDPKKYGGYAGISNSFAVLVKGTIEKGAKKKITNVLEFQGISILDRINYRKDKLNFLLEKGYKDIELIIELPKYSLFELSDGSRRMLASILSTNNKRGEIHKGNQIFLSQKFVKLLYHAKRISNTINENHRKYVENHKKEFEELFYYILEFNENYVGAKKNGKLLNSAFQSWQNHSIDELCSSFIGPTGSERKGLFELTSRGSAADFEFLGVKIPRYRDYTPSSLLKDATLIHQSVTGLYETRIDLAKLGEG

SEQ ID NO: 2430 - protein, 120 aa, Artificial Sequence
  Synthetic polypeptide
  MISC_FEATURE (5)..(120)
GGGSGGGSGGGSGGGSGGGSGGGSGGGSGGGSGGGSGGGSGGGSGGGSGGGSGGGSGGGSGGGSGGGSGGGSGGGSGGGSGGGSGGGSGGGSGGGSGGGSGGGSGGGSGGGSGGGSGGGS

SEQ ID NO: 2431 - protein, 7 aa, Artificial Sequence
  Synthetic polypeptide
PKKKRKV

SEQ ID NO: 2432 - protein, 30 aa, Artificial Sequence
  Synthetic polypeptide
MDSLLMNRRKFLYQFKNVRWAKGRRETYLC

SEQ ID NO: 2433 - DNA, 6000 bp, Homo sapiens
gaggagctgaagaggaattaaaatatacaggatgaaaagatggcaatgttgcctcccccaggacctcagagctttgtccatttcacaaaacagtctcttgccctcattgaacaacgcattgctgaaagaaaatcaaaggaacccaaagaagaaaagaaagatgatgatgaagaagccccaaagccaagcagtgacttggaagctggcaaacagctgcccttcatctatggggacattcctcccggcatggtgtcagagcccctggaggacttggacccctactatgcagacaaaaagactttcatagtattgaacaaagggaaaacaatcttccgtttcaatgccacacctgctttatatatgctttctcctttcagtcctctaagaagaatatctattaagattttagtacactccttattcagcatgctcatcatgtgcactattctgacaaactgcatatttatgaccatgaataacccaccggactggaccaaaaatgtcgagtacacttttactggaatatatacttttgaatcacttgtaaaaatccttgcaagaggcttctgtgtaggagaattcacttttcttcgtgacccgtggaactggctggattttgtcgtcattgtttttgcgtatttaacagaatttgtaaacctaggcaatgtttcagctcttcgaactttcagagtattgagagctttgaaaactatttctgtaatcccaggcctgaagacaattgtaggggctttgatccagtcagtgaagaagctttctgatgtcatgatcctgactgtgttctgtctgagtgtgtttgcactaattggactacagctgttcatgggaaacctgaagcataaatgttttcgaaattcacttgaaaataatgaaacattagaaagcataatgaataccctagagagtgaagaagactttagaaaatatttttattacttggaaggatccaaagatgctctcctttgtggtttcagcacagattcaggtcagtgtccagaggggtacacctgtgtgaaaattggcagaaaccctgattatggctacacgagctttgacactttcagctgggccttcttagccttgtttaggctaatgacccaagattactgggaaaacctttaccaacagacgctgcgtgctgctggcaaaacctacatgatcttctttgtcgtagtgattttcctgggctccttttatctaataaacttgatcctggctgtggttgccatggcatatgaagaacagaaccaggcaaacattgaagaagctaaacagaaagaattagaatttcaacagatgttagaccgtcttaaaaaagagcaagaagaagctgaggcaattgcagcggcagcggctgaatatacaagtattaggagaagcagaattatgggcctctcagagagttcttctgaaacatccaaactgagctctaaaagtgctaaagaaagaagaaacagaagaaagaaaaagaatcaaaagaagctctccagtggagaggaaaagggagatgctgagaaattgtcgaaatcagaatcagaggacagcatcagaagaaaaagtttccaccttggtgtcgaagggcataggcgagcacatgaaaagaggttgtctacccccaatcagtcaccactcagcattcgtggctccttgttttctgcaaggcgaagcagcagaacaagtctttttagtttcaaaggcagaggaagagatataggatctgagactgaatttgccgatgatgagcacagcatttttggagacaatgagagcagaaggggctcactgtttgtgccccacagaccccaggagcgacgcagcagtaacatcagccaagccagtaggtccccaccaatgctgccggtgaacgggaaaatgcacagtgctgtggactgcaacggtgtggtctccctggttgatggacgctcagccctcatgctccccaatggacagcttctgccagagggcacgaccaatcaaatacacaagaaaaggcgttgtagttcctatctcctttcagaggatatgctgaatgatcccaacctcagacagagagcaatgagtagagcaagcatattaacaaacactgtggaagaacttgaagagtccagacaaaaatgtccaccttggtggtacagatttgcacacaaattcttgatctggaattgctctccatattggataaaattcaaaaagtgtatctattttattgtaatggatccttttgtagatcttgcaattaccatttgcatagttttaaacacattatttatggctatggaacaccacccaatgactgaggaattcaaaaatgtacttgctataggaaatttggtctttactggaatctttgcagctgaaatggtattaaaactgattgccatggatccatatgagtatttccaagtaggctggaatatttttgacagccttattgtgactttaagtttagtggagctctttctagcagatgtggaaggattgtcagttctgcgatcattcagactgctccgagtcttcaagttggcaaaatcctggccaacattgaacatgctgattaagatcattggtaactcagtaggggctctaggtaacctcaccttagtgttggccatcatcgtcttcatttttgctgtggtcggcatgcagctctttggtaagagctacaaagaatgtgtctgcaagatcaatgatgactgtacgctcccacggtggcacatgaacgacttcttccactccttcctgattgtgttccgcgtgctgtgtggagagtggatagagaccatgtgggactgtatggaggtcgctggtcaagctatgtgccttattgtttacatgatggtcatggtcattggaaacctggtggtcctaaacctatttctggccttattattgagctcatttagttcagacaatcttacagcaattgaagaagaccctgatgcaaacaacctccagattgcagtgactagaattaaaaagggaataaattatgtgaaacaaaccttacgtgaatttattctaaaagcattttccaaaaagccaaagatttccagggagataagacaagcagaagatctgaatactaagaaggaaaactatatttctaaccatacacttgctgaaatgagcaaaggtcacaatttcctcaaggaaaaagataaaatcagtggttttggaagcagcgtggacaaacacttgatggaagacagtgatggtcaatcatttattcacaatcccagcctcacagtgacagtgccaattgcacctggggaatccgatttggaaaatatgaatgctgaggaacttagcagtgattcggatagtgaatacagcaaagtgagattaaaccggtcaagctcctcagagtgcagcacagttgataaccctttgcctggagaaggagaagaagcagaggctgaacctatgaattccgatgagccagaggcctgtttcacagatggttgtgtatggaggttctcatgctgccaagttaacatagagtcagggaaaggaaaaatctggtggaacatcaggaaaacctgctacaagattgttgaacacagttggtttgaaagcttcattgtcctcatgatcctgctcagcagtggtgccctggcttttgaagatatttatattgaaaggaaaaagaccattaagattatcctggagtatgcagacaagatcttcacttacatcttcattctggaaatgcttctaaaatggatagcatatggttataaaacatatttcaccaatgcctggtgttggctggatttcctaattgttgatgtttctttggttactttagtggcaaacactcttggctactcagatcttggccccattaaatcccttcggacactgagagctttaagacctctaagagccttatctagatttgaaggaatgagggtcgttgtgaatgcactcataggagcaattccttccatcatgaatgtgctacttgtgtgtcttatattctggctgatattcagcatcatgggagtaaatttgtttgctggcaagttctatgagtgtattaacaccacagatgggtcacggtttcctgcaagtcaagttccaaatcgttccgaatgttttgcccttatgaatgttagtcaaaatgtgcgatggaaaaacctgaaagtgaactttgataatgtcggacttggttacctatctctgcttcaagttgcaacttttaagggatggacgattattatgtatgcagcagtggattctgttaatgtagacaagcagcccaaatatgaatatagcctctacatgtatatttattttgtcgtctttatcatctttgggtcattcttcactttgaacttgttcattggtgtcatcatagataatttcaaccaacagaaaaagaagcttggaggtcaagacatctttatgacagaagaacagaagaaatactataatgcaatgaaaaagctggggtccaagaagccacaaaagccaattcctcgaccagggaacaaaatccaaggatgtatatttgacctagtgacaaatcaagcctttgatattagtatcatggttcttatctgtctcaacatggtaaccatgatggtagaaaaggagggtcaaagtcaacatatgactgaagttttatattggataaatgtggtttttataatccttttcactggagaatgtgtgctaaaactgatctccctcagacactactacttcactgtaggatggaatatttttgattttgtggttgtgattatctccattgtaggtatgtttctagctgatttgattgaaacgtattttgtgtcccctaccctgttccgagtgatccgtcttgccaggattggccgaatcctacgtctagtcaaaggagcaaaggggatccgcacgctgctctttgctttgatgatgtcccttcctgcgttgtttaacatcggcctcctgctcttcctggtcatgttcatctacgccatctttggaatgtccaactttgcctatgttaaaaaggaagatggaattaatgacatgttcaattttgagacctttggcaacagtatgatttgcctgttccaaattacaacctctgctggctgggatggattgctagcacctattcttaacagtaagccacccgactgtgacccaaaaaaagttcatcctggaagttcagttgaaggagactgtggtaacccatctgttggaatattctactttgttagttatatcatcatatccttcctggttgtggtgaacatgtacattgcagtcatactggagaattttagtgttgccactgaagaaagtactgaacctctgagtgaggatgactttgagatgttctatgaggtttgggagaagtttgatcccgatgcgacccagtttatagagttctctaaactctctgattttgcagctgccctggatcctcctcttctcatagcaaaacccaacaaagtccagctcattgccatggatctgcccatggttagtggtgaccggatccattgtcttgacatcttatttgcttttacaaagcgtgttttgggtgagagtggggagatggattctcttcgttcacagatggaagaaaggttcatgtctgcaaatccttccaaagtgtcctatgaacccatcacaaccacactaaaacggaaacaagaggatgtgtctgctactgtcattcagcgtgcttatagacgttaccgcttaaggcaaaatgtcaaaaatatatcaagtatatacataaaagatggagacagagatgatgatttactcaataaaaaagatatggcttttgataatgttaatgagaactcaagtccagaaaaaacagatgccacttcatccaccacctctccaccttcatatgatagtgtaacaaagccagacaaagagaaatatgaacaagacagaacagaaaaggaagacaaagggaaagacagcaaggaaagcaaaaaatagagcttcatttttgatatattgtttaca

SEQ ID NO: 2434 - protein, 1977 aa, Homo sapiens
MAMLPPPGPQSFVHFTKQSLALIEQRIAERKSKEPKEEKKDDDEEAPKPSSDLEAGKQLPFIYGDIPPGMVSEPLEDLDPYYADKKTFIVLNKGKTIFRFNATPALYMLSPFSPLRRISIKILVHSLFSMLIMCTILTNCIFMTMNNPPDWTKNVEYTFTGIYTFESLVKILARGFCVGEFTFLRDPWNWLDFVVIVFAYLTEFVNLGNVSALRTFRVLRALKTISVIPGLKTIVGALIQSVKKLSDVMILTVFCLSVFALIGLQLFMGNLKHKCFRNSLENNETLESIMNTLESEEDFRKYFYYLEGSKDALLCGFSTDSGQCPEGYTCVKIGRNPDYGYTSFDTFSWAFLALFRLMTQDYWENLYQQTLRAAGKTYMIFFVVVIFLGSFYLINLILAVVAMAYEEQNQANIEEAKQKELEFQQMLDRLKKEQEEAEAIAAAAAEYTSIRRSRIMGLSESSSETSKLSSKSAKERRNRRKKKNQKKLSSGEEKGDAEKLSKSESEDSIRRKSFHLGVEGHRRAHEKRLSTPNQSPLSIRGSLFSARRSSRTSLFSFKGRGRDIGSETEFADDEHSIFGDNESRRGSLFVPHRPQERRSSNISQASRSPPMLPVNGKMHSAVDCNGVVSLVDGRSALMLPNGQLLPEGTTNQIHKKRRCSSYLLSEDMLNDPNLRQRAMSRASILTNTVEELEESRQKCPPWWYRFAHKFLIWNCSPYWIKFKKCIYFIVMDPFVDLAITICIVLNTLFMAMEHHPMTEEFKNVLAIGNLVFTGIFAAEMVLKLIAMDPYEYFQVGWNIFDSLIVTLSLVELFLADVEGLSVLRSFRLLRVFKLAKSWPTLNMLIKIIGNSVGALGNLTLVLAIIVFIFAVVGMQLFGKSYKECVCKINDDCTLPRWHMNDFFHSFLIVFRVLCGEWIETMWDCMEVAGQAMCLIVYMMVMVIGNLVVLNLFLALLLSSFSSDNLTAIEEDPDANNLQIAVTRIKKGINYVKQTLREFILKAFSKKPKISREIRQAEDLNTKKENYISNHTLAEMSKGHNFLKEKDKISGFGSSVDKHLMEDSDGQSFIHNPSLTVTVPIAPGESDLENMNAEELSSDSDSEYSKVRLNRSSSSECSTVDNPLPGEGEEAEAEPMNSDEPEACFTDGCVWRFSCCQVNIESGKGKIWWNIRKTCYKIVEHSWFESFIVLMILLSSGALAFEDIYIERKKTIKIILEYADKIFTYIFILEMLLKWIAYGYKTYFTNAWCWLDFLIVDVSLVTLVANTLGYSDLGPIKSLRTLRALRPLRALSRFEGMRVVVNALIGAIPSIMNVLLVCLIFWLIFSIMGVNLFAGKFYECINTTDGSRFPASQVPNRSECFALMNVSQNVRWKNLKVNFDNVGLGYLSLLQVATFKGWTIIMYAAVDSVNVDKQPKYEYSLYMYIYFVVFIIFGSFFTLNLFIGVIIDNFNQQKKKLGGQDIFMTEEQKKYYNAMKKLGSKKPQKPIPRPGNKIQGCIFDLVTNQAFDISIMVLICLNMVTMMVEKEGQSQHMTEVLYWINVVFIILFTGECVLKLISLRHYYFTVGWNIFDFVVVIISIVGMFLADLIETYFVSPTLFRVIRLARIGRILRLVKGAKGIRTLLFALMMSLPALFNIGLLLFLVMFIYAIFGMSNFAYVKKEDGINDMFNFETFGNSMICLFQITTSAGWDGLLAPILNSKPPDCDPKKVHPGSSVEGDCGNPSVGIFYFVSYIIISFLVVVNMYIAVILENFSVATEESTEPLSEDDFEMFYEVWEKFDPDATQFIEFSKLSDFAAALDPPLLIAKPNKVQLIAMDLPMVSGDRIHCLDILFAFTKRVLGESGEMDSLRSQMEERFMSANPSKVSYEPITTTLKRKQEDVSATVIQRAYRRYRLRQNVKNISSIYIKDGDRDDDLLNKKDMAFDNVNENSSPEKTDATSSTTSPPSYDSVTKPDKEKYEQDRTEKEDKGKDSKESKK

SEQ ID NO: 2435 - DNA, 12851 bp, Homo sapiens
cggggctgctacctccacgggcgcgccctggcaggaggggcgcagtctgcttgcaggcggtcgccagcgctccagcggcggctgtcggctttccaattccgccagctcggctgaggctgggctagcctgggtgccagtggctgctagcggcaggcgtcccctgagcaacaggagcccagagaaaaagaagcagccctgagagagcgccggggaaggagaggcccgcgccctctcctggagccagattctgcaggtgcactgggtggggatgatcggcgggctaggttgcaagtaagtgccttttcttttgctgcttctgtggggaggggaggagaagccctcggtctttctttatgttgttattattagtttttaatgggcctttcttggcaggcaaatagttaagtctttatttctttgtttccatccaggcctcttatgtgaggagctgaagaggaattaaaatatacaggatgaaaagatggcaatgttgcctcccccaggacctcagagctttgtccatttcacaaaacagtctcttgccctcattgaacaacgcattgctgaaagaaaatcaaaggaacccaaagaagaaaagaaagatgatgatgaagaagccccaaagccaagcagtgacttggaagctggcaaacagctgcccttcatctatggggacattcctcccggcatggtgtcagagcccctggaggacttggacccctactatgcagacaaaaaggtgagtttattttgacttcagtggtcagtttctgttggcttccttctgtataaaaattattatattgatgtgaaaaattgatattttggattctcaatttcatcctttctttttcctcctgcagactttcatagtattgaacaaagggaaaacaatcttccgtttcaatgccacacctgctttatatatgctttctcctttcagtcctctaagaagaatatctattaagattttagtacactcatatccttttaaaaatgattacatccagtggcactttatggtgtaatttttgctattttattcaaatacccactgtcgtctcttttgttccttgattctaagctaccttattcagcatgctcatcatgtgcactattctgacaaactgcatatttatgaccatgaataacccaccggactggaccaaaaatgtcgagtaagtgggtataagtacattttaatatagttttggtattatcatttcatcctttccttttcctgccaggaattataaagatttacatggtggttgtattcttttcacatctagtatcccaatggaatcttgtgtttaggtacacttttactggaatatatacttttgaatcacttgtaaaaatccttgcaagaggcttctgtgtaggagaattcacttttcttcgtgacccgtggaactggctggattttgtcgtcattgtttttgcgtaagtactttcagctttttgaaacggcaaatttatgaaaatctcaggcagcactcaggtaagtatcatagactctatctaaattctgaataattctgatttaattctacaggtatttaacagaatttgtaaacctaggcaatgtttcagctcttcgaactttcagagtattgagagctttgaaaactatttctgtaatcccaggtaagaagtaattggtgtgaagcattaggccactcataactccaactattatgtcattacaaacacttttttctcccattttcaggcctgaagacaattgtaggggctttgatccagtcagtgaagaagctttctgatgtcatgatcctgactgtgttctgtctgagtgtgtttgcactaattggactacagctgttcatgggaaacctgaagcataaatgttttcgaaattcacttgaaaataatgaaacattagaaagcataatgaataccctagagagtgaagaagactttagaagtaagaatgtccttgcatttgttattaggttgaaataatgctaaaaacattgattaatttacctcctttatcacaatcacagattaaagtctgtgatgttataactgttcaaattcttcttcaacagaatatttttattacttggaaggatccaaagatgctctcctttgtggtttcagcacagattcagggtatgtaatatttgttttctttttagtctaaaggctgaaagagaaggaaaagaatgttcagcagtaaggctatttagcttgtgtcctgaagacactctcacctataatgttctttctcgtgtgtagtcagtgtccagaggggtacacctgtgtgaaaattggcagaaaccctgattatggctacacgagctttgacactttcagctgggccttcttagccttgtttaggctaatgacccaagattactgggaaaacctttaccaacaggtgagtaccaagagaaacatgcattgtatttttgaatggcatatgtacctggtgtatgttaagagcctgtattaggaggttttttatttatttaaaaactttttattgttcaaatgacaatttccatttttccctagacgctgcgtgctgctggcaaaacctacatgatcttctttgtcgtagtgattttcctgggctccttttatctaataaacttgatcctggctgtggttgccatggcatatgaagaacagaaccaggcaaacattgaagaagctaaacagaaagaattagaatttcaacagatgttagaccgtcttaaaaaagagcaagaagaagctgaggtactgttatttgatttaaaattcttcctagaggtagaaatgcaaacggtgtcctagggtttcctaggatttggaaatgactcatttaagtgttaacgtcttggcccaaccaggcaattgcagcggcagcggctgaatatacaagtattaggagaagcagaattatgggcctctcagagagttcttctgaaacatccaaactgagctctaaaagtgctaaagaaagaagaaacagaagaaagaaaaagaatcaaaagaagctctccagtggagaggaaaagggagatgctgagaaattgtcgaaatcagaatcagaggacagcatcagaagaaaaagtttccaccttggtgtcgaagggcataggcgagcacatgaaaagaggttgtctacccccaatcaggtaccacccaaattgctaaatgtgtatcacccgaggcagaatgctagaatatgaagtgtacttctatcagtaggtgcttcagcaaccacgttttttttaatttttctgcagtcaccactcagcattcgtggctccttgttttctgcaaggcgaagcagcagaacaagtctttttagtttcaaaggcagaggaagagatataggatctgagactgaatttgccgatgatgagcacagcatttttggagacaatgagagcagaaggggctcactgtttgtgccccacagaccccaggagcgacgcagcagtaacatcagccaagccagtaggtccccaccaatgctgccggtgaacgggaaaatgcacagtgctgtggactgcaacggtgtggtctccctggttgatggacgctcagccctcatgctccccaatggacagcttctgccagaggtgataatagataaggcaacttctgatgacagcgtaaggacgttttacctatataagcaagattttatcttatacctacaatttattaggattctgttcttaagacattaattgattttttttttagggcacgaccaatcaaatacacaagaaaaggcgttgtagttcctatctcctttcagaggatatgctgaatgatcccaacctcagacagagagcaatgagtagagcaagcatattaacaaacactgtggaaggtatgtaataatcttcttttactgtacagattcttaaataaagacaaatggctgactccatgttctctgcttttttctcccagaacttgaagagtccagacaaaaatgtccaccttggtggtacagatttgcacacaaattcttgatctggaattgctctccatattggataaaattcaaaaagtgtatctattttattgtaatggatccttttgtagatcttgcaattaccatttgcatagttttaaacacattatttatggctatggaacaccacccaatgactgaggaattcaaaaatgtacttgctataggaaatttggtaagtctcttattgtgtgttatgtactcatagtttctctttttagttgtcatcattgtcatttcatataacagtgattattatcattgtgttgatttcctgttttctaatattaacagaaaaacattatttttctcacttaggtctttactggaatctttgcagctgaaatggtattaaaactgattgccatggatccatatgagtatttccaagtaggctggaatatttttgacagccttattgtgactttaagtttagtggagctctttctagcagatgtggaaggattgtcagttctgcgatcattcagactggtaaacataaactaaggttgccattatattctataataaaggggtatttcttgaaaagattttcatagtgattaacattaaactttatatttgcttttagctccgagtcttcaagttggcaaaatcctggccaacattgaacatgctgattaagatcattggtaactcagtaggggctctaggtaacctcaccttagtgttggccatcatcgtcttcatttttgctgtggtcggcatgcagctctttggtaagagctacaaagaatgtgtctgcaagatcaatgatgactgtacgctcccacggtggcacatgaacgacttcttccactccttcctgattgtgttccgcgtgctgtgtggagagtggatagagaccatgtgggactgtatggaggtcgctggtcaagctatgtgccttattgtttacatgatggtcatggtcattggaaacctggtggtatgtaaccagatgttcatgcattttaatttctctgtggaaattattttattttttatatttcctgtctccctatttctctaccccctctccccaccctgatataggtcctaaacctatttctggccttattattgagctcatttagttcagacaatcttacagcaattgaagaagaccctgatgcaaacaacctccagattgcagtgactagaattaaaaagggaataaattatgtgaaacaaaccttacgtgaatttattctaaaagcattttccaaaaagccaaagatttccagggagataagacaagcagaagatctgaatactaagaaggaaaactatatttctaaccatacacttgctgaaatgagcaaaggtcacaatttcctcaaggaaaaagataaaatcagtggttttggaagcagcgtggacaaacacttgatggaagacagtgatggtcaatcatttattcacaatcccagcctcacagtgacagtgccaattgcacctggggaatccgatttggaaaatatgaatgctgaggaacttagcagtgattcggatagtgaatacagcaaagtggtaagaatgcttcatatactttgtgtttcatattaacaattagtatgaaatgaatgaaaattttgaatgaactctaaatgaactacctggtggggtggtgaattcctttctagagattaaaccggtcaagctcctcagagtgcagcacagttgataaccctttgcctggagaaggagaagaagcagaggctgaacctatgaattccgatgagccagaggcctgtttcacagatggtaagacaaaaattgagaccttggttagcattccttaattagtgttctggggtttgtcttaacgcctaatacttacccaagatttaacatgcatgtctttcttgtcaggttgtgtatggaggttctcatgctgccaagttaacatagagtcagggaaaggaaaaatctggtggaacatcaggaaaacctgctacaagattgttgaacacagttggtttgaaagcttcattgtcctcatgatcctgctcagcagtggtgccctggtaaatgatctgacacctaagtcaatatattgattaagtcaatattctttaaaatgagctaaaatcctgttttttttaaatgaatcatgaagcttaagttgtgcatgattgaaacttgaatattatttccacaggcttttgaagatatttatattgaaaggaaaaagaccattaagattatcctggagtatgcagacaagatcttcacttacatcttcattctggaaatgcttctaaaatggatagcatatggttataaaacatatttcaccaatgcctggtgttggctggatttcctaattgttgatgtaggtacttttgagtacattttaaaagaggatttattcttactgtgtgttgtgaaagtttcagaattgactttttccttttatgcttcatcattttattgacacaattaatgaaaatgttatttttataggtttctttggttactttagtggcaaacactcttggctactcagatcttggccccattaaatcccttcggacactgagagctttaagacctctaagagccttatctagatttgaaggaatgagggtaagaaaatactaaactttataatgttcttattttttaatggggtttaaaactttcatgttgcctatttaacatcttactaatcctaatcatgcttttctttcttttgaatactaggtcgttgtgaatgcactcataggagcaattccttccatcatgaatgtgctacttgtgtgtcttatattctggctgatattcagcatcatgggagtaaatttgtttgctggcaagttctatgagtgtattaacaccacagatgggtcacggtttcctgcaagtcaagttccaaatcgttccgaatgttttgcccttatgaatgttagtcaaaatgtgcgatggaaaaacctgaaagtgaactttgataatgtcggacttggttacctatctctgcttcaagttgtaagtgtcccatttcatgagtgcttggtattttaatagatattggacgaaggtctgtttatggctattttagaatatgagcttaacattcaaattctattaatgttattcttaaaggcaacttttaagggatggacgattattatgtatgcagcagtggattctgttaatgtaagtattgattatcttagcactaaactttatttttaaaagcttcttagtttatttcagtgatttccaaactataacttcatccatataatgctaacttttgtaaattttataggtagacaagcagcccaaatatgaatatagcctctacatgtatatttattttgtcgtctttatcatctttgggtcattcttcactttgaacttgttcattggtgtcatcatagataatttcaaccaacagaaaaagaagataagtatttcaaatatttttcattgtaatttagtaatctatagaaagatgtagacaatgattctggttttaactacatttattttttgtttgtttctttaccttggaggtcaagacatctttatgacagaagaacagaagaaatactataatgcaatgaaaaagctggggtccaagaagccacaaaagccaattcctcgaccaggggtaaaaaaatatatatatctttagcatatagattttcaaattatttctaattcatttttaatgcacatctttaatttctggataatacttgaaaagtttactctgcattcgatattattcttatttctttgcagaacaaaatccaaggatgtatatttgacctagtgacaaatcaagcctttgatattagtatcatggttcttatctgtctcaacatggtaaccatgatggtagaaaaggagggtcaaagtcaacatatgactgaagttttatattggataaatgtggtttttataatccttttcactggagaatgtgtgctaaaactgatctccctcagacactactacttcactgtaggatggaatatttttgattttgtggttgtgattatctccattgtaggtaagaatatttatttttcagattttattttttgagtaaagctaaacttcacttatgctcaaggaagctgtttagagtcatcatttcaggtagcatacatctttaaatattttatttctattattttcctccacatacaggtatgtttctagctgatttgattgaaacgtattttgtgtcccctaccctgttccgagtgatccgtcttgccaggattggccgaatcctacgtctagtcaaaggagcaaaggggatccgcacgctgctctttgctttgatgatgtcccttcctgcgttgtttaacatcggcctcctgctcttcctggtcatgttcatctacgccatctttggaatgtccaactttgcctatgttaaaaaggaagatggaattaatgacatgttcaattttgagacctttggcaacagtatgatttgcctgttccaaattacaacctctgctggctgggatggattgctagcacctattcttaacagtaagccacccgactgtgacccaaaaaaagttcatcctggaagttcagttgaaggagactgtggtaacccatctgttggaatattctactttgttagttatatcatcatatccttcctggttgtggtgaacatgtacattgcagtcatactggagaattttagtgttgccactgaagaaagtactgaacctctgagtgaggatgactttgagatgttctatgaggtttgggagaagtttgatcccgatgcgacccagtttatagagttctctaaactctctgattttgcagctgccctggatcctcctcttctcatagcaaaacccaacaaagtccagctcattgccatggatctgcccatggttagtggtgaccggatccattgtcttgacatcttatttgcttttacaaagcgtgttttgggtgagagtggggagatggattctcttcgttcacagatggaagaaaggttcatgtctgcaaatccttccaaagtgtcctatgaacccatcacaaccacactaaaacggaaacaagaggatgtgtctgctactgtcattcagcgtgcttatagacgttaccgcttaaggcaaaatgtcaaaaatatatcaagtatatacataaaagatggagacagagatgatgatttactcaataaaaaagatatggcttttgataatgttaatgagaactcaagtccagaaaaaacagatgccacttcatccaccacctctccaccttcatatgatagtgtaacaaagccagacaaagagaaatatgaacaagacagaacagaaaaggaagacaaagggaaagacagcaaggaaagcaaaaaatagagcttcatttttgatatattgtttacagcctgtgaaagtgatttatttgtgttaataaaactcttttgaggaagtctatgccaaaatcctttttatcaaaatattctcgaaggcagtgcagtcactaactctgatttcctaagaaaggtgggcagcattagcagatggttatttttgcactgatgattctttaagaatcgtaagagaactctgtaggaattattgattatagcatacaaaagtgattcagttttttggtttttaataaatcagaagaccatgtagaaaacttttacatctgccttgtcatcttttcacaggattgtaattagtcttgtttcccatgtaaataaacaacacacgcatacagaaaaatctattatttatctattatttggaaatcaacaaaagtatttgccttggctttgcaatgaaatgcttgatagaagtaatggacattagttatgaatgtttagttaaaatgcattattagggagcttgactttttatcaatgtacagaggttattctatattttgaggtgcttaaatttattctacattgcatcagaaccaatttatatgtgcctataaaatgccatgggattaaaaatatatgtaggctattcatttctacaaatgtttttcattcatcttgactcacatgccaacaaggataagacttacctttagagtattgtgtttcatagcctttcttctttcatatccctttttgttcatagaataaccacagaacttgaaaaattattctaagtacatattacactcctcaaaaaaaacaaagataactgagaaaaaagttattgacagaagttctatttgctattatttacatagcctaacatttgactgtgctgcccaaaatactgataatagtctcttaaactcttttgtcaaattttcctgctttcttatgcagtattgtttagtcatcctttcgctgtaagcaaagttgatgaaatccttcctgatatgcagttagttgtttgaccacggtacatacttgagcagataataacttgggcacagtatttattgcatcacttgtatacaatcccgtgtttggcaagctttcaaatcatgtaatatgacagactttacacagatatgtgtttagtatgaataaaaaagcattgaaatagggattcttgccaacttgctctcttgccaccaacttactttcctaaattatggaagtaatcttttttggatatacttcaatgtatacaatgaggaagatgtcaccttctccttaaaattctatgatgtgaaatatattttgcctcaatcaacacagtaccatgggcttctaatttatcaagcacatattcattttgcattagctgtagacatctagttttttgaaaacacctattaatagtaatttgaaaagaaataaccataatgctttttttcgtgagtttatttcaggaatatgagatctttcttctataaagttattcatgcacaggcaaaaattgagctacacaggtagaatgtagttttacttagaagatttttgtgggaggttttgaagcaaatatataaaacaactttcactaatttgctttccatatttaaaaaataataaattacatttatataataaatgtttaaagcacatattttttgttgttctggcaatttaaaaagaaagaggatttaaacgtacctatagaaacaaagatttatggttaaagaatgagatcagaagtctagaatgtttttaaattgtgatatattttacaacatccgttattactttgagacatttgtcctaatctacgtataaaactcaatctagggctaaagattctttataccatcttaggttcattcatcttaggctatttgaaccactttttaatttaatatgaaagacaccatgcagtgttttccgagactacatagatcattttatcacatacctaccaagcctgttggaaataggttttgataatttaagtagggacctatacaaaatatattacatttatcagatttttaaatacattcaattaagaatttaacatcaccttaaatttgaattcaatctaccgttatttcaaactcacaaatataactgcattatgaatacttacataatgtagtaagacaagatgtttgacaggttcgtgtgtaattttctattaatgtttttacattgccttgtttttatgtaaaataaaaaatatgggcaactggtttgttaacaacacaatttcttcttagcatttcaaaaatatatataaagttgttctttttcctatttcatgaactatgtttttttttaaaataacatggttaagttttatatatatttacgtttgtttcaggaatgtctacttgtgactttttatcaattaaaaataatatttggaagaaagagcttattaagtataagcttgaagtaaaattagacctctctttccatgtagattactgtttgtactgatggtttcacccttcagaaggcactgtcatattaatatttaaattttataatcgctgaacttattacacccaacaatacagaaaggcagttacactgaagaacttaacttagaataaaatggaagcaaacaggttttctaaaaacttttttaagtgaccaggtctcgctctgtcacccaggctagagtgcaatggcatgatcatagctctctgcagcctcaactctgggctcaagcaaccctcctgcctcagcctcccaagtagctaagactacaggtacatgccaccatgcctggctaatatttaaatttttgtagataaggggtcttgctatgttgcccaggctagtctcaaactcctggcttcaagtgttcctactgtcatgacctgccaacatgctggggttacaggcatgagccaccatgccccaaacaggtttgaacacaaatctttcggatgaaaattagagaacctaattttagctttttgatagttacctagtttgcaaaagatttgggtgacttgtgagctgtttttaaatgctgattgttgaacatcacaacccaaaatacttagcatgattttatagagttttgatagctttattaaaaagagtgaaaataaaatgcatatgtaaataaagcagttctaaatagctatttcagagaaatgttaatagaagtgctgaaagaagggccaactaaattaggatggccagggaattggcctgggtttaggacctatgtatgaaggccaccaattttttaaaaatatctgtggtttattatgttattatcttcttgaggaaaacaatcaagaattgcttcatgaaaataaataaatagccatgaatatcataaagctgtttacataggattctttacaaatttcatagatctatgaatgctcaaaatgtttgagtttgccataaattatattgtagttatattgtagttatacttgagactgacacattgtaatataatctaagaataaaagttatacaaaataa

SEQ ID NO: 2436 - protein, 1956 aa, Homo sapiens
MEFPIGSLETNNFRRFTPESLVEIEKQIAAKQGTKKAREKHREQKDQEEKPRPQLDLKACNQLPKFYGELPAELIGEPLEDLDPFYSTHRTFMVLNKGRTISRFSATRALWLFSPFNLIRRTAIKVSVHSWFSLFITVTILVNCVCMTRTDLPEKIEYVFTVIYTFEALIKILARGFCLNEFTYLRDPWNWLDFSVITLAYVGTAIDLRGISGLRTFRVLRALKTVSVIPGLKVIVGALIHSVKKLADVTILTIFCLSVFALVGLQLFKGNLKNKCVKNDMAVNETTNYSSHRKPDIYINKRGTSDPLLCGNGSDSGHCPDGYICLKTSDNPDFNYTSFDSFAWAFLSLFRLMTQDSWERLYQQTLRTSGKIYMIFFVLVIFLGSFYLVNLILAVVTMAYEEQNQATTDEIEAKEKKFQEALEMLRKEQEVLAALGIDTTSLHSHNGSPLTSKNASERRHRIKPRVSEGSTEDNKSPRSDPYNQRRMSFLGLASGKRRASHGSVFHFRSPGRDISLPEGVTDDGVFPGDHESHRGSLLLGGGAGQQGPLPRSPLPQPSNPDSRHGEDEHQPPPTSELAPGAVDVSAFDAGQKKTFLSAEYLDEPFRAQRAMSVVSIITSVLEELEESEQKCPPCLTSLSQKYLIWDCCPMWVKLKTILFGLVTDPFAELTITLCIVVNTIFMAMEHHGMSPTFEAMLQIGNIVFTIFFTAEMVFKIIAFDPYYYFQKKWNIFDCIIVTVSLLELGVAKKGSLSVLRSFRLLRVFKLAKSWPTLNTLIKIIGNSVGALGNLTIILAIIVFVFALVGKQLLGENYRNNRKNISAPHEDWPRWHMHDFFHSFLIVFRILCGEWIENMWACMEVGQKSICLILFLTVMVLGNLVVLNLFIALLLNSFSADNLTAPEDDGEVNNLQVALARIQVFGHRTKQALCSFFSRSCPFPQPKAEPELVVKLPLSSSKAENHIAANTARGSSGGLQAPRGPRDEHSDFIANPTVWVSVPIAEGESDLDDLEDDGGEDAQSFQQEVIPKGQQEQLQQVERCGDHLTPRSPGTGTSSEDLAPSLGETWKDESVPQVPAEGVDDTSSSEGSTVDCLDPEEILRKIPELADDLEEPDDCFTEGCIRHCPCCKLDTTKSPWDVGWQVRKTCYRIVEHSWFESFIIFMILLSSGSLAFEDYYLDQKPTVKALLEYTDRVFTFIFVFEMLLKWVAYGFKKYFTNAWCWLDFLIVNISLISLTAKILEYSEVAPIKALRTLRALRPLRALSRFEGMRVVVDALVGAIPSIMNVLLVCLIFWLIFSIMGVNLFAGKFWRCINYTDGEFSLVPLSIVNNKSDCKIQNSTGSFFWVNVKVNFDNVAMGYLALLQVATFKGWMDIMYAAVDSREVNMQPKWEDNVYMYLYFVIFIIFGGFFTLNLFVGVIIDNFNQQKKKLGGQDIFMTEEQKKYYNAMKKLGSKKPQKPIPRPLNKFQGFVFDIVTRQAFDITIMVLICLNMITMMVETDDQSEEKTKILGKINQFFVAVFTGECVMKMFALRQYYFTNGWNVFDFIVVVLSIASLIFSAILKSLQSYFSPTLFRVIRLARIGRILRLIRAAKGIRTLLFALMMSLPALFNIGLLLFLVMFIYSIFGMSSFPHVRWEAGIDDMFNFQTFANSMLCLFQITTSAGWDGLLSPILNTGPPYCDPNLPNSNGTRGDCGSPAVGIIFFTTYIIISFLIMVNMYIAVILENFNVATEESTEPLSEDDFDMFYETWEKFDPEATQFITFSALSDFADTLSGPLRIPKPNRNILIQMDLPLVPGDKIHCLDILFAFTKNVLGESGELDSLKANMEEKFMATNLSKSSYEPIATTLRWKQEDISATVIQKAYRSYVLHRSMALSNTPCVPRAEEEAASLPDEGFVAFTANENCVLPDKSETASATSFPPSYESVTRGLSDRVNMRTSSSIQNEDEATSMELIAPGP

SEQ ID NO: 2437 - protein, 1791 aa, Homo sapiens
MDDRCYPVIFPDERNFRPFTSDSLAAIEKRIAIQKEKKKSKDQTGEVPQPRPQLDLKASRKLPKLYGDIPRELIGKPLEDLDPFYRNHKTFMVLNRKRTIYRFSAKHALFIFGPFNSIRSLAIRVSVHSLFSMFIIGTVIINCVFMATGPAKNSNSNNTDIAECVFTGIYIFEALIKILARGFILDEFSFLRDPWNWLDSIVIGIAIVSYIPGITIKLLPLRTFRVFRALKAISVVSRLKVIVGALLRSVKKLVNVIILTFFCLSIFALVGQQLFMGSLNLKCISRDCKNISNPEAYDHCFEKKENSPEFKMCGIWMGNSACSIQYECKHTKINPDYNYTNFDNFGWSFLAMFRLMTQDSWEKLYQQTLRTTGLYSVFFFIVVIFLGSFYLINLTLAVVTMAYEEQNKNVAAEIEAKEKMFQEAQQLLKEEKEALVAMGIDRSSLTSLETSYFTPKKRKLFGNKKRKSFFLRESGKDQPPGSDSDEDCQKKPQLLEQTKRLSQNLSLDHFDEHGDPLQRQRALSAVSILTITMKEQEKSQEPCLPCGENLASKYLVWNCCPQWLCVKKVLRTVMTDPFTELAITICIIINTVFLAMEHHKMEASFEKMLNIGNLVFTSIFIAEMCLKIIALDPYHYFRRGWNIFDSIVALLSFADVMNCVLQKRSWPFLRSFRVLRVFKLAKSWPTLNTLIKIIGNSVGALGSLTVVLVIVIFIFSVVGMQLFGRSFNSQKSPKLCNPTGPTVSCLRHWHMGDFWHSFLVVFRILCGEWIENMWECMQEANASSSLCVIVFILITVIGKLVVLNLFIALLLNSFSNEERNGNLEGEARKTKVQLALDRFRRAFCFVRHTLEHFCHKWCRKQNLPQQKEVAGGCAAQSKDIIPLVMEMKRGSETQEELGILTSVPKTLGVRHDWTWLAPLAEEEDDVEFSGEDNAQRITQPEPEQQAYELHQENKKPTSQRVQSVEIDMFSEDEPHLTIQDPRKKSDVTSILSECSTIDLQDGFGWLPEMVPKKQPERCLPKGFGCCFPCCSVDKRKPPWVIWWNLRKTCYQIVKHSWFESFIIFVILLSSGALIFEDVHLENQPKIQELLNCTDIIFTHIFILEMVLKWVAFGFGKYFTSAWCCLDFIIVIVSVTTLINLMELKSFRTLRALRPLRALSQFEGMKVVVNALIGAIPAILNVLLVCLIFWLVFCILGVYFFSGKFGKCINGTDSVINYTIITNKSQCESGNFSWINQKVNFDNVGNAYLALLQVATFKGWMDIIYAAVDSTEKEQQPEFESNSLGYIYFVVFIIFGSFFTLNLFIGVIIDNFNQQQKKLGGQDIFMTEEQKKYYNAMKKLGSKKPQKPIPRPLNKCQGLVFDIVTSQIFDIIIISLIILNMISMMAESYNQPKAMKSILDHLNWVFVVIFTLECLIKIFALRQYYFTNGWNLFDCVVVLLSIVSTMISTLENQEHIPFPPTLFRIVRLARIGRILRLVRAARGIRTLLFALMMSLPSLFNIGLLLFLIMFIYAILGMNWFSKVNPESGIDDIFNFKTFASSMLCLFQISTSAGWDSLLSPMLRSKESCNSSSENCHLPGIATSYFVSYIIISFLIVVNMYIAVILENFNTATEESEDPLGEDDFDIFYEVWEKFDPEATQFIKYSALSDFADALPEPLRVAKPNKYQFLVMDLPMVSEDRLHCMDILFAFTARVLGGSDGLDSMKAMMEEKFMEANPLKKLYEPIVTTTKRKEEERGAAIIQKAFRKYMMKVTKGDQGDQNDLENGPHSPLQTLCNGDLSSFGVAKGKVHCD

SEQ ID NO: 2438 - protein, 2000 aa, Homo sapiens
MAQALLVPPGPESFRLFTRESLAAIEKRAAEEKAKKPKKEQDNDDENKPKPNSDLEAGKNLPFIYGDIPPEMVSEPLEDLDPYYINKKTFIVMNKGKAIFRFSATSALYILTPLNPVRKIAIKILVHSLFSMLIMCTILTNCVFMTLSNPPDWTKNVEYTFTGIYTFESLIKILARGFCLEDFTFLRDPWNWLDFSVIVMAYVTEFVSLGNVSALRTFRVLRALKTISVIPGLKTIVGALIQSVKKLSDVMILTVFCLSVFALIGLQLFMGNLRNKCLQWPPSDSAFETNTTSYFNGTMDSNGTFVNVTMSTFNWKDYIGDDSHFYVLDGQKDPLLCGNGSDAGQCPEGYICVKAGRNPNYGYTSFDTFSWAFLSLFRLMTQDYWENLYQLTLRAAGKTYMIFFVLVIFLGSFYLVNLILAVVAMAYEEQNQATLEEAEQKEAEFQQMLEQLKKQQEEAQAVAAASAASRDFSGIGGLGELLESSSEASKLSSKSAKEWRNRRKKRRQREHLEGNNKGERDSFPKSESEDSVKRSSFLFSMDGNRLTSDKKFCSPHQSLLSIRGSLFSPRRNSKTSIFSFRGRAKDVGSENDFADDEHSTFEDSESRRDSLFVPHRHGERRNSNVSQASMSSRMVPGLPANGKMHSTVDCNGVVSLVGGPSALTSPTGQLPPEGTTTETEVRKRRLSSYQISMEMLEDSSGRQRAVSIASILTNTMEELEESRQKCPPCWYRFANVFLIWDCCDAWLKVKHLVNLIVMDPFVDLAITICIVLNTLFMAMEHYPMTEQFSSVLTVGNLVFTGIFTAEMVLKIIAMDPYYYFQEGWNIFDGIIVSLSLMELGLSNVEGLSVLRSFRLLRVFKLAKSWPTLNMLIKIIGNSVGALGNLTLVLAIIVFIFAVVGMQLFGKSYKECVCKINDDCTLPRWHMNDFFHSFLIVFRVLCGEWIETMWDCMEVAGQTMCLIVFMLVMVIGNLVVLNLFLALLLSSFSSDNLAATDDDNEMNNLQIAVGRMQKGIDYVKNKMRECFQKAFFRKPKVIEIHEGNKIDSCMSNNTGIEISKELNYLRDGNGTTSGVGTGSSVEKYVIDENDYMSFINNPSLTVTVPIAVGESDFENLNTEEFSSESELEESKEKLNATSSSEGSTVDVVLPREGEQAETEPEEDLKPEACFTEGCIKKFPFCQVSTEEGKGKIWWNLRKTCYSIVEHNWFETFIVFMILLSSGALAFEDIYIEQRKTIKTMLEYADKVFTYIFILEMLLKWVAYGFQTYFTNAWCWLDFLIVDVSLVSLVANALGYSELGAIKSLRTLRALRPLRALSRFEGMRVVVNALVGAIPSIMNVLLVCLIFWLIFSIMGVNLFAGKFYHCVNMTTGNMFDISDVNNLSDCQALGKQARWKNVKVNFDNVGAGYLALLQVATFKGWMDIMYAAVDSRDVKLQPVYEENLYMYLYFVIFIIFGSFFTLNLFIGVIIDNFNQQKKKFGGQDIFMTEEQKKYYNAMKKLGSKKPQKPIPRPANKFQGMVFDFVTRQVFDISIMILICLNMVTMMVETDDQGKYMTLVLSRINLVFIVLFTGEFVLKLVSLRHYYFTIGWNIFDFVVVILSIVGMFLAEMIEKYFVSPTLFRVIRLARIGRILRLIKGAKGIRTLLFALMMSLPALFNIGLLLFLVMFIYAIFGMSNFAYVKKEAGIDDMFNFETFGNSMICLFQITTSAGWDGLLAPILNSAPPDCDPDTIHPGSSVKGDCGNPSVGIFFFVSYIIISFLVVVNMYIAVILENFSVATEESAEPLSEDDFEMFYEVWEKFDPDATQFIEFSKLSDFAAALDPPLLIAKPNKVQLIAMDLPMVSGDRIHCLDILFAFTKRVLGESGEMDALRIQMEDRFMASNPSKVSYEPITTTLKRKQEEVSAAIIQRNFRCYLLKQRLKNISSNYNKEAIKGRIDLPIKQDMIIDKLNGNSTPEKTDGSSSTTSPPSYDSVTKPDKEKFEKDKPEKESKGKEVRENQK

SEQ ID NO: 2439 - protein, 2353 aa, Homo sapiens
MTEGARAADEVRVPLGAPPPGPAALVGASPESPGAPGREAERGSELGVSPSESPAAERGAELGADEEQRVPYPALAATVFFCLGQTTRPRSWCLRLVCNPWFEHVSMLVIMLNCVTLGMFRPCEDVECGSERCNILEAFDAFIFAFFAVEMVIKMVALGLFGQKCYLGDTWNRLDFFIVVAGMMEYSLDGHNVSLSAIRTVRVLRPLRAINRVPSMRILVTLLLDTLPMLGNVLLLCFFVFFIFGIVGVQLWAGLLRNRCFLDSAFVRNNNLTFLRPYYQTEEGEENPFICSSRRDNGMQKCSHIPGRRELRMPCTLGWEAYTQPQAEGVGAARNACINWNQYYNVCRSGDSNPHNGAINFDNIGYAWIAIFQVITLEGWVDIMYYVMDAHSFYNFIYFILLIIVGSFFMINLCLVVIATQFSETKQRESQLMREQRARHLSNDSTLASFSEPGSCYEELLKYVGHIFRKVKRRSLRLYARWQSRWRKKVDPSAVQGQGPGHRQRRAGRHTASVHHLVYHHHHHHHHHYHFSHGSPRRPGPEPGACDTRLVRAGAPPSPPSPGRGPPDAESVHSIYHADCHIEGPQERARVAHAAATAAASLRLATGLGTMNYPTILPSGVGSGKGSTSPGPKGKWAGGPPGTGGHGPLSLNSPDPYEKIPHVVGEHGLGQAPGHLSGLSVPCPLPSPPAGTLTCELKSCPYCTRALEDPEGELSGSESGDSDGRGVYEFTQDVRHGDRWDPTRPPRATDTPGPGPGSPQRRAQQRAAPGEPGWMGRLWVTFSGKLRRIVDSKYFSRGIMMAILVNTLSMGVEYHEQPEELTNALEISNIVFTSMFALEMLLKLLACGPLGYIRNPYNIFDGIIVVISVWEIVGQADGGLSVLRTFRLLRVLKLVRFLPALRRQLVVLVKTMDNVATFCTLLMLFIFIFSILGMHLFGCKFSLKTDTGDTVPDRKNFDSLLWAIVTVFQILTQEDWNVVLYNGMASTSSWAALYFVALMTFGNYVLFNLLVAILVEGFQAEGDANRSDTDEDKTSVHFEEDFHKLRELQTTELKMCSLAVTPNGHLEGRGSLSPPLIMCTAATPMPTPKSSPFLDAAPSLPDSRRGSSSSGDPPLGDQKPPASLRSSPCAPWGPSGAWSSRRSSWSSLGRAPSLKRRGQCGERESLLSGEGKGSTDDEAEDGRAAPGPRATPLRRAESLDPRPLRPAALPPTKCRDRDGQVVALPSDFFLRIDSHREDAAELDDDSEDSCCLRLHKVLEPYKPQWCRSREAWALYLFSPQNRFRVSCQKVITHKMFDHVVLVFIFLNCVTIALERPDIDPGSTERVFLSVSNYIFTAIFVAEMMVKVVALGLLSGEHAYLQSSWNLLDGLLVLVSLVDIVVAMASAGGAKILGVLRVLRLLRTLRPLRVISRAPGLKLVVETLISSLRPIGNIVLICCAFFIIFGILGVQLFKGKFYYCEGPDTRNISTKAQCRAAHYRWVRRKYNFDNLGQALMSLFVLSSKDGWVNIMYDGLDAVGVDQQPVQNHNPWMLLYFISFLLIVSFFVLNMFVGVVVENFHKCRQHQEAEEARRREEKRLRRLERRRRSTFPSPEAQRRPYYADYSPTRRSIHSLCTSHYLDLFITFIICVNVITMSMEHYNQPKSLDEALKYCNYVFTIVFVFEAALKLVAFGFRRFFKDRWNQLDLAIVLLSLMGITLEEIEMSAALPINPTIIRIMRVLRIARVLKLLKMATGMRALLDTVVQALPQVGNLGLLFMLLFFIYAALGVELFGRLECSEDNPCEGLSRHATFSNFGMAFLTLFRVSTGDNWNGIMKDTLRECSREDKHCLSYLPALSPVYFVTFVLVAQFVLVNVVVAVLMKHLEESNKEAREDAELDAEIELEMAQGPGSARRVDADRPPLPQESPGARDAPNLVARKVSVSRMLSLPNDSYMFRPVVPASAPHPRPLQEVEMETYGAGTPLGSVASVHSPPAESCASLQIPLAVSSPARSGEPLHALSPRGTARSPSLSRLLCRQEAVHTDSLEGKIDSPRDTLDPAEPGEKTPVRPVTQGGSLQSPPRSPRPASVRTRKHTFGQRCVSSRPAAPGGEEAEASDPADEEVSHITSSACPWQPTAEPHGPEASPVAGGERDLRRLYSVDAQGFLDKPGRADEQWRPSAELGSGEPGEAKAWGPEAEPALGARRKKKMSPPCISVEPPAEDEGSARPSAAEGGSTTLRRRTPSCEATPHRDSLEPTEGSGAGGDPAAKGERWGQASCRAEHLTVPSFAFEPLDLGVPSGDPFLDGSHSVTPESRASSSGAIVPLEPPESEPPMPVGDPPEKRRGLYLTVPQCPLEKPGSPSATPAPGGGADDPV

SEQ ID NO: 2440 - protein, 890 aa, Homo sapiens
MEGGGKPNSSSNSRDDGNSVFPAKASATGAGPAAAEKRLGTPPGGGGAGAKEHGNSVCFKVDGGGGGGGGGGGGEEPAGGFEDAEGPRRQYGFMQRQFTSMLQPGVNKFSLRMFGSQKAVEKEQERVKTAGFWIIHPYSDFRFYWDLIMLIMMVGNLVIIPVGITFFTEQTTTPWIIFNVASDTVFLLDLIMNFRTGTVNEDSSEIILDPKVIKMNYLKSWFVVDFISSIPVDYIFLIVEKGMDSEVYKTARALRIVRFTKILSLLRLLRLSRLIRYIHQWEEIFHMTYDLASAVVRIFNLIGMMLLLCHWDGCLQFLVPLLQDFPPDCWVSLNEMVNDSWGKQYSYALFKAMSHMLCIGYGAQAPVSMSDLWITMLSMIVGATCYAMFVGHATALIQSLDSSRRQYQEKYKQVEQYMSFHKLPADMRQKIHDYYEHRYQGKIFDEENILNELNDPLREEIVNFNCRKLVATMPLFANADPNFVTAMLSKLRFEVFQPGDYIIREGAVGKKMYFIQHGVAGVITKSSKEMKLTDGSYFGEICLLTKGRRTASVRADTYCRLYSLSVDNFNEVLEEYPMMRRAFETVAIDRLDRIGKKNSILLQKFQKDLNTGVFNNQENEILKQIVKHDREMVQAIAPINYPQMTTLNSTSSTTTPTSRMRTQSPPVYTATSLSHSNLHSPSPSTQTPQPSAILSPCSYTTAVCSPPVQSPLAARTFHYASPTASQLSLMQQQPQQQVQQSQPPQTQPQQPSPQPQTPGSSTPKNEVHKSTQALHNTNLTREVRPLSASQPSLPHEVSTLISRPHPTVGESLASIPQPVTAVPGTGLQAGGRSTVPQRVTLFRQMSSGAIPPNRGVPPAPPPPAAALPRESSSVLNTDPDAEKPRFASNL

SEQ ID NO: 2441 - protein, 889 aa, Homo sapiens
MDARGGGGRPGESPGATPAPGPPPPPPPAPPQQQPPPPPPPAPPPGPGPAPPQHPPRAEALPPEAADEGGPRGRLRSRDSSCGRPGTPGAASTAKGSPNGECGRGEPQCSPAGPEGPARGPKVSFSCRGAASGPAPGPGPAEEAGSEEAGPAGEPRGSQASFMQRQFGALLQPGVNKFSLRMFGSQKAVEREQERVKSAGAWIIHPYSDFRFYWDFTMLLFMVGNLIIIPVGITFFKDETTAPWIVFNVVSDTFFLMDLVLNFRTGIVIEDNTEIILDPEKIKKKYLRTWFVVDFVSSIPVDYIFLIVEKGIDSEVYKTARALRIVRFTKILSLLRLLRLSRLIRYIHQWEEIFHMTYDLASAVMRICNLISMMLLLCHWDGCLQFLVPMLQDFPRNCWVSINGMVNHSWSELYSFALFKAMSHMLCIGYGRQAPESMTDIWLTMLSMIVGATCYAMFIGHATALIQSLDSSRRQYQEKYKQVEQYMSFHKLPADFRQKIHDYYEHRYQGKMFDEDSILGELNGPLREEIVNFNCRKLVASMPLFANADPNFVTAMLTKLKFEVFQPGDYIIREGTIGKKMYFIQHGVVSVLTKGNKEMKLSDGSYFGEICLLTRGRRTASVRADTYCRLYSLSVDNFNEVLEEYPMMRRAFETVAIDRLDRIGKKNSILLHKVQHDLNSGVFNNQENAIIQEIVKYDREMVQQAELGQRVGLFPPPPPPPQVTSAIATLQQAAAMSFCPQVARPLVGPLALGSPRLVRRPPPGPAPAAASPGPPPPASPPGAPASPRAPRTSPYGGLPAAPLAGPALPARRLSRASRPLSASQPSLPHGAPGPAASTRPASSSTPRLGPTPAARAAAPSPDRRDSASPGAAGGLDPQDSARSRLSSNL

SEQ ID NO: 2442 - protein, 986 aa, Homo sapiens
MRVNEKYSTLPAEDRSVHIINICAIEDIGYLPSEGTLLNSLSVDPDAECKYGLYFRDGRRKVDYILVYHHKRPSGNRTLVRRVQHSDTPSGARSVKQDHPLPGKGASLDAGSGEPPMDYHEDDKRFRREEYEGNLLEAGLELERDEDTKIHGVGFVKIHAPWNVLCREAEFLKLKMPTKKMYHINETRGLLKKINSVLQKITDPIQPKVAEHRPQTMKRLSYPFSREKQHLFDLSDKDSFFDSKTRSTIVYEILKRTTCTKAKYSMGITSLLANGVYAAAYPLHDGDYNGENVEFNDRKLLYEEWARYGVFYKYQPIDLVRKYFGEKIGLYFAWLGVYTQMLIPASIVGIIVFLYGCATMDENIPSMEMCDQRHNITMCPLCDKTCSYWKMSSACATARASHLFDNPATVFFSVFMALWAATFMEHWKRKQMRLNYRWDLTGFEEEEEAVKDHPRAEYEARVLEKSLKKESRNKEKRRHIPEESTNKWKQRVKTAMAGVKLTDKVKLTWRDRFPAYLTNLVSIIFMIAVTFAIVLGVIIYRISMAAALAMNSSPSVRSNIRVTVTATAVIINLVVIILLDEVYGCIARWLTKIEVPKTEKSFEERLIFKAFLLKFVNSYTPIFYVAFFKGRFVGRPGDYVYIFRSFRMEECAPGGCLMELCIQLSIIMLGKQLIQNNLFEIGIPKMKKLIRYLKLKQQSPPDHEECVKRKQRYEVDYNLEPFAGLTPEYMEMIIQFGFVTLFVASFPLAPLFALLNNIIEIRLDAKKFVTELRRPVAVRAKDIGIWYNILRGIGKLAVIINAFVISFTSDFIPRLVYLYMYSKNGTMHGFVNHTLSSFNVSDFQNGTAPNDPLDLGYEVQICRYKDYREPPWSENKYDISKDFWAVLAARLAFVIVFQNLVMFMSDFVDWVIPDIPKDISQQIHKEKVLMVELFMREEQDKQQLLETWMEKERQKDEPPCNHHNTKACPDSLGSPAPSHAYHGGVL

SEQ ID NO: 2443 - DNA, 32 bp, Artificial Sequence
  Synthetic polynucleotide
tccagccagttccaagggtcacggaggaaggt

SEQ ID NO: 2444 - DNA, 36 bp, Artificial Sequence
  Synthetic polynucleotide
tccagccagttccaagggtcacggaggaaggtgaat

SEQ ID NO: 2445 - DNA, 32 bp, Artificial Sequence
  Synthetic polynucleotide
ctaccctgttccgagtcattcgcctggccagg

SEQ ID NO: 2446 - DNA, 33 bp, Artificial Sequence
  Synthetic polynucleotide
caaaaatgttccatcccacagtgaagtagtaat

SEQ ID NO: 2447 - RNA, 20 nt, Artificial Sequence
  Synthetic polynucleotide
gccaguuccaagggucacgg

SEQ ID NO: 2448 - RNA, 20 nt, Artificial Sequence
  Synthetic polynucleotide
gccaguuccaagggucacgg

SEQ ID NO: 2449 - RNA, 20 nt, Artificial Sequence
  Synthetic polynucleotide
gccaguuccaagggucacgg

SEQ ID NO: 2450 - RNA, 20 nt, Artificial Sequence
  Synthetic polynucleotide
guuccaagggucacggagga

SEQ ID NO: 2451 - RNA, 21 nt, Artificial Sequence
  Synthetic polynucleotide
ccaguuccaagggucacggag

SEQ ID NO: 2452 - RNA, 20 nt, Artificial Sequence
  Synthetic polynucleotide
ccuguuccgagucauucgcc

SEQ ID NO: 2453 - RNA, 21 nt, Artificial Sequence
  Synthetic polynucleotide
uguuccaucccacagugaagu

SEQ ID NO: 2454 - RNA, 21 nt, Artificial Sequence
  Synthetic polynucleotide
aaauguuccaucccacaguga

SEQ ID NO: 2455 - RNA, 20 nt, Artificial Sequence
  Synthetic polynucleotide
gacccccuccaccccgccuc

SEQ ID NO: 2456 - RNA, 20 nt, Artificial Sequence
  Synthetic polynucleotide
ugugguagccauggcguacg

SEQ ID NO: 2457 - RNA, 20 nt, Artificial Sequence
  Synthetic polynucleotide
acagaagcuguccaguggcg

SEQ ID NO: 2458 - RNA, 20 nt, Artificial Sequence
  Synthetic polynucleotide
cugaguacacgaguuuaggg

SEQ ID NO: 2459 - RNA, 20 nt, Artificial Sequence
  Synthetic polynucleotide
gaaaagcuuccaucucggcg

SEQ ID NO: 2460 - RNA, 20 nt, Artificial Sequence
  Synthetic polynucleotide
ggugcccuuccacgccgaga

SEQ ID NO: 2461 - RNA, 20 nt, Artificial Sequence
  Synthetic polynucleotide
ugagcaaaucuguaccacca

SEQ ID NO: 2462 - RNA, 20 nt, Artificial Sequence
  Synthetic polynucleotide
uaucucaaaccguacccuug

SEQ ID NO: 2463 - RNA, 20 nt, Artificial Sequence
  Synthetic polynucleotide
caaggacacaaaacgaacag

SEQ ID NO: 2464 - RNA, 20 nt, Artificial Sequence
  Synthetic polynucleotide
guaguggucaacgcacucau

SEQ ID NO: 2465 - protein, 90 aa, Artificial Sequence
  Synthetic polypeptide
  MISC_FEATURE (4)..(90)
GGSGGSGGSGGSGGSGGSGGSGGSGGSGGSGGSGGSGGSGGSGGSGGSGGSGGSGGSGGSGGSGGSGGSGGSGGSGGSGGSGGSGGSGGS

SEQ ID NO: 2466 - protein, 120 aa, Artificial Sequence
  Synthetic polypeptide
  MISC_FEATURE (5)..(120)
SGGSSGGSSGGSSGGSSGGSSGGSSGGSSGGSSGGSSGGSSGGSSGGSSGGSSGGSSGGSSGGSSGGSSGGSSGGSSGGSSGGSSGGSSGGSSGGSSGGSSGGSSGGSSGGSSGGSSGGS

What is claimed is:

1. A method of editing a polynucleotide encoding an ion channel in a dorsal root ganglia (DRG) neuron, the method comprising contacting the ion channel-encoding polynucleotide with:
(i) a fusion protein comprising: (a) a guide nucleotide sequence-programmable DNA binding protein domain; and (b) a cytosine deaminase domain; and
(ii) a guide nucleotide sequence targeting the fusion protein of (i) to a target cytosine (C) base in the ion channel-encoding polynucleotide,
whereby the contacting results in deamination of the target C base by the fusion protein, resulting in a cytosine (C) to thymine (T) change in the ion channel-encoding polynucleotide.

2. The method of claim 1, wherein the guide nucleotide sequence-programmable DNA binding protein domain is selected from the group consisting of: nuclease inactive Cas9 (dCas9) domains, nuclease inactive Cpf1 domains, nuclease inactive Argonaute domains, and variants thereof.

3. The method of claim 2, wherein the guide nucleotide sequence-programmable DNA-binding protein domain is a nuclease inactive Cas9 (dCas9) domain.

4. The method of claim 2 or 3, wherein the dCas9 domain is from Streptococcus pyogenes.

5. The method of any one of claims 2-4, wherein the amino acid sequence of the dCas9 domain includes mutations corresponding to a D10A and/or H840A mutation in SEQ ID NO: 1.

6. The method of claim 5, wherein the amino acid sequence of the dCas9 domain includes a mutation corresponding to a D10A mutation in SEQ ID NO: 1, and wherein the dCas9 domain includes a histidine at the position corresponding to amino acid 840 of SEQ ID NO: 1.

7. The method of claim 1 or 2, wherein the guide nucleotide sequence-programmable DNA-binding protein domain comprises a nuclease inactive Cpf1 (dCpf1) domain.

8. The method of claim 7, wherein the dCpf1domain is from a species of Acidaminococcus or Lachnospiraceae.

9. The method of claim 1 or 2, wherein the guide nucleotide sequence-programmable DNA-binding protein domain comprises a nuclease inactive Argonaute (dAgo) domain.

10. The method of claim 9, wherein the dAgo domain is from Natronobacterium gregoryi (dNgAgo).

11. The method of any of claims 1-10, wherein the cytosine deaminase domain comprises an apolipoprotein B mRNA-editing complex (APOBEC) family deaminase.

12. The method of any one of claims 1-10, wherein the cytosine deaminase is selected from the group consisting of APOBEC1, APOBEC2, APOBEC3A, APOBEC3B, APOBEC3C, APOBEC3D, APOBEC3F, APOBEC3G deaminase, APOBEC3H deaminase, APOBEC4 deaminase, activation-induced deaminase (AID), and pmCDA1.

13. The method of claim 11 or 12, wherein the cytosine deaminase comprises the amino acid sequence of any one of SEQ ID NOs: 271-292, 303, and 2483-2494.

14. The method of any one of claims 1-13, wherein the fusion protein further comprises a uracil glycosylase inhibitor (UGI) domain.

15. The method of claim 14, wherein the UGI domain comprises the amino acid sequence of SEQ ID NO: 304.

16. The method of claim 14 or 15, wherein the cytosine deaminase domain is fused to the N-terminus of the guide nucleotide sequence-programmable DNA-binding protein domain.

17. The method of claim 16, wherein the UGI domain is fused to the C-terminus of the guide nucleotide sequence-programmable DNA-binding protein domain.

18. The method of any one of claims 1-17, wherein the cytosine deaminase and the guide nucleotide sequence-programmable DNA-binding protein domain are fused via an optional linker.

19. The method of claim 18, wherein the UGI domain is fused to the guide nucleotide sequence-programmable DNA-binding protein domain via an optional linker.

20. The method of any one of claims 14-19, wherein the fusion protein has the structure NH₂-[cytosine deaminase domain]-[optional linker sequence]-[guide nucleotide sequence-programmable DNA-binding protein domain]-[optional linker sequence]-[UGI domain]-COOH.

21. The method of any one of claims 14-19, wherein the fusion protein has the structure NH₂-[UGI domain]-[optional linker sequence]-[cytosine deaminase domain]-[optional linker sequence]-[guide nucleotide sequence-programmable DNA-binding protein domain]-COOH.

22. The method of claim 16 or 18, wherein the fusion protein has the structure NH₂-[cytosine deaminase domain]-[optional linker sequence]-[guide nucleotide sequence-programmable DNA-binding protein domain]-COOH.

23. The method of any one of claims 18-22, wherein the linker comprises (GGGS)ₙ (SEQ ID NO: 2430), (GGGGS)ₙ (SEQ ID NO: 308), (G)ₙ, (EAAAK)ₙ (SEQ ID NO: 309), (GGS)ₙ, SGSETPGTSESATPES (SEQ ID NO: 310), or (XP)ₙ motif, or a combination of any of these, wherein n is independently an integer between 1 and 30, and wherein X is any amino acid.

24. The method of claim 23, wherein the linker comprises the amino acid sequence SGSETPGTSESATPES (SEQ ID NO: 310).

25. The method of claim 23, wherein the linker is (GGS)ₙ, and wherein n is 1, 3, or 7.

26. The method of any one of claims 1-25, wherein the fusion protein comprises the amino acid sequence of any one of SEQ ID NO: 10 and 293-302.

27. The method of any one of claims 1-26, wherein the polynucleotide encoding the ion channel comprises a coding strand and a complementary strand.

28. The method of any one of claims 1-27, wherein the polynucleotide encoding the ion channel comprises a coding region and a non-coding region.

29. The method of any of claims claim 1-28, wherein the C to T change occurs in the coding region of the ion channel-encoding polynucleotide.

30. The method of claim 29, wherein the C to T change leads to a mutation in the ion channel.

31. The method of claim 29 or 30, wherein the mutation introduces a premature stop codon in the ion channel-coding sequence that leads to a truncated or non-functional ion channel.

32. The method of claim 31, wherein the premature stop codon is TAG (Amber), TGA (Opal), or TAA (Ochre).

33. The method of claim 29 or 30, wherein the mutation destabilizes ion-channel protein folding.

34. The method of claim 28, wherein the C to T change occurs at a C base-paired with the G base in a start codon (AUG).

35. The method of claim 28, wherein the C to T change occurs at the non-coding region of the ion channel-encoding polynucleotide.

36. The method of claim 35, wherein the C to T change occurs at a splicing site in the non-coding region of the ion channel-encoding polynucleotide.

37. The method of claim 35, wherein the C to T change occurs at an intron-exon junction.

38. The method of claim 35, wherein the C to T change occurs at a splicing donor site.

39. The method of claim 35, wherein the C to T change occurs at a splicing acceptor site.

40. The method of any one of claims 1-39, wherein the ion channel is selected from the group consisting of: NaV1.7, NaV1.8, NaV1.9, NaV1.3, CaV3.2, HCN1, HCN2, and Ano1.

41. The method of claim 40, wherein the ion channel is NaV1.7 encoded by the SCN9A gene.

42. The method of claim 30, wherein the mutation is a loss-of-function mutation.

43. The method of claim 42, wherein the C to T change occurs in a target codon selected from Tables 2, 4, and 6.

44. The method of claim 43, wherein the guide nucleotide sequence is selected from SEQ ID NOs: 339-1456.

45. The method of any one of claims 1-44, wherein a PAM sequence is located 3′ of the C being changed.

46. The method of any one of claims 1-44, wherein a PAM sequence is located 5′ of the C being changed.

47. The method of claim 45 or 46, wherein the PAM sequence is selected from the group consisting of: NGG, NGAN, NGNG, NGAG, NGCG, NNGRRT, NGGNG, NGRRN, NNNRRT, NNNGATT, NNAGAA, and NAAAC, wherein Y is pyrimidine, R is purine, and N is any nucleobase.

48. The method of claim 45 or 46, wherein the PAM sequence is selected from the group consisting of: NNT, NNNT, and YNT, wherein Y is pyrimidine, and N is any nucleobase.

49. The method of any one of claims 1-44, wherein no PAM sequence is located 3′ of the target C base.

50. The method of any one of claims 1-44, wherein no PAM sequence is located 5′ of the target C base.

51. The method of any of claim 1-50, wherein at least 1, 2, 3, 4, 5, 6, 7, 8, 9, or 10 mutations are introduced into the ion channel-encoding polynucleotide.

52. The method of any one of claims 1-51, wherein the guide nucleotide sequence is RNA (gRNA).

53. The method of any one of claims 1-51, wherein the guide nucleotide sequence is ssDNA (gDNA).

54. The method of any one of claims 1-53, wherein the DRG neuron is in a mammal.

55. The method of claim 54, wherein the mammal is a rodent.

56. The method of claim 55, wherein the rodent is a mouse.

57. The method of claim 55, wherein the rodent is a rat.

58. The method of claim 54, wherein the mammal is a human.

59. The method of any one of claims 1-58, wherein a nucleic acid construct encoding the fusion protein is delivered to the DRG neuron via a neurotropic viral delivery vector.

60. The method of claim 59, wherein the neurotropic viral delivery vector is derived from Herpesviridae, varicella zoster virus, pseudorabies virus, cyromegalovirus, Epstein-barr virus, encephalitis virus, polio virus, coxsackie virus, echo virus, mumps virus, measles virus, and rabies virus.

61. The method of claim 59 or 60, wherein the neurotropic viral delivery vector is derived from Herpes Simplex Virus 1 (HSV-1).

62. The method of claim 59 or 60, wherein the neurotropic viral delivery vector is derived from a recombinant adeno-associated virus (AAV).

63. A composition comprising:
(i) a fusion protein comprising: (a) a guide nucleotide sequence-programmable DNA binding protein domain; and (b) a cytosine deaminase domain; and
(ii) a guide nucleotide sequence targeting the fusion protein of (i) to a target cytosine (C) base in an ion channel-encoding polynucleotide.

64. A composition comprising a neurotropic viral delivery vector comprising a nucleic acid encoding:
(i) a fusion protein comprising: (a) a guide nucleotide sequence-programmable DNA binding protein domain; and (b) a cytosine deaminase domain; and
(ii) a guide nucleotide sequence targeting the fusion protein of (i) to a target cytosine (C) base in an ion channel-encoding polynucleotide.

65. The composition of claim 63 or 64, wherein the guide nucleotide sequence comprises the nucleotide sequence of any one of SEQ ID NOs: 339-1456 or 1504-2425.

66. The composition of any one of claims 63-65, wherein the composition further comprises a pharmaceutically acceptable carrier.

67. A kit comprising the composition of any one of claims 63-66.

68. A method of suppressing pain, the method comprising administering to a subject in need thereof a therapeutically effective amount of the composition of any one of claims 63-66.

69. The method of claim 68, wherein the pain is chronic pain.

70. The method of claim 68 or 69, wherein the pain is selected from the group consisting of: neuropathic pain, allodynia, hyperalgesia, dysesthesia, causalgia, neuralgia, and arthralgia.

71. The method of claim 68 or 69, wherein the pain is associated with cancer, tumor pressure, bone metastasis, chemotherapy peripheral neuropathy, sciatica radiculopathy, lumbar radiculopathy, cervical radiculopathy, failed back surgery syndrome, piriformis syndrome, phantom pain, arachnoiditis, fibromyalgia, facet joint mediated pain, sympathetically-mediated pain syndrome, complex regional pain syndromes (crps), sacroiliac (si) joint mediated pain, meralgia paresthetica, localized myofacial pain syndromes, myofacial trigger points, diffuse myofacial pain syndrome, post-herpetic neuralgia, trigeminal neuralgia, glossopharyngeal neuralgia, post-epesiotomy scar pain, post-hernia repair scar pain, post-surgery scar pain, post-radiotherapy scar pain, vulvodynia, vaginismus, levator ani syndrome, chronic prostatitis, interstitial cystitis, first bite syndrome, rheumatoid arthritis pain, osteoarthritis pain, atypical odontalgia, phantom tooth pain, neuropathic orofacial pain, primary primary erythermalgia, or atypical facial pain.

72. The method of any one of claims 68-71, wherein the subject is a mammal.

73. The method of claim 72, wherein the mammal is a rodent.

74. The method of claim 73, wherein the rodent is a mouse.

75. The method of claim 73, wherein the rodent is a rat.

76. The method of claim 72, wherein the mammal is a human.

77. The method of claim 73, wherein the mammal is a companion animal.

78. The method of claim 77, wherein the companion animal is a dog, a cat, a horses, a cattle, a pig, a sheep, a goat, a chicken, a mouse, a rat, a guinea pig, or a hamster.

79. The method of any one of claims 68-78, wherein the composition is administered orally or parenterally.
